(19) United States
(12) Patent Application Publication
(10) Pub. No.: US 2025/0108132 A1
(43) Pub. Date: Apr. 3, 2025

(54) COMPOSITIONS AND METHODS FOR REDUCING COMPLEMENT ACTIVATION

(71) Applicant: Beam Therapeutics Inc., Cambridge, MA (US)

(72) Inventors: Michael S. Packer, Cambridge, MA (US); Christopher Fincher, Cambridge, MA (US); Tanggis Bohnuud, Cambridge, MA (US); Yi Yu, Cambridge, MA (US); Nicole Gaudelli, Cambridge, MA (US); Brian Cafferty, Cambridge, MA (US)

(73) Assignee: Beam Therapeutics Inc., Cambridge, MA (US)

(21) Appl. No.: 18/979,227

(22) Filed: Dec. 12, 2024

Related U.S. Application Data
(63) Continuation of application No. PCT/US23/68543, filed on Jun. 15, 2023.
(60) Provisional application No. 63/352,547, filed on Jun. 15, 2022.

(51) Int. Cl. A61K 48/00; A61K 9/127; A61K 9/51; A61P 37/06; C12N 9/22; C12N 9/80; C12N 15/11; C12N 15/88

(52) U.S. Cl. CPC A61K 48/005; A61K 9/127; A61K 9/5123; A61P 37/06; C12N 9/22; C12N 9/80; C12N 15/111; C12N 15/88; C07K 2319/80; C12N 2310/20; C12Y 305/04004

(57) ABSTRACT

Compositions and methods for reducing complement activation by introducing one or more alterations into a complement component 3 (C3) polynucleotide in a cell. In particular embodiments, the disclosure features a base editor system (e.g., a fusion protein or complex comprising a programmable DNA binding protein, a nucleobase editor, and gRNA) for modifying a C3 polynucleotide, where the modification is associated with reduced expression, and/or reduced activity of the C3 polypeptide encoded by the polynucleotide.

### CROSS REFERENCE TO RELATED APPLICATIONS

[0001] This application is a continuation under 35 U.S.C. § 111(a) of PCT International Patent Application No. PCT/US2023/068543, filed Jun. 15, 2023, designating the United States and published in English, which claims priority to U.S. Provisional Application No. 63/352,547 filed Jun. 15, 2022, the entire contents of each of which are incorporated by reference herein.

### SEQUENCE LISTING

[0002] This application contains a Sequence Listing which has been submitted electronically in XML format and is hereby incorporated by reference in its entirety. The Sequence Listing XML file, created on Jun. 14, 2023, is named 180802-055102PCT_SL.xml and is 1,364,888 bytes in size.

### BACKGROUND

[0003] The complement system is an important part of the innate immune system and is involved in the clearance of microbes and cellular debris, as well as the activation of inflammation and diverse immune pathways. Overactivation of the complement system or inappropriate targeting to one's own cells can lead to disease; however, inhibition of complement system activity has been successfully and safely shown to provide therapeutic benefit for patients suffering from an overactive complement system. Therefore, improved methods for reducing complement system activation in such patients.

### SUMMARY

[0004] As described below, the present disclosure features compositions and methods for reducing complement activation by introducing one or more alterations into a complement component 3 (C3) polynucleotide in a cell. In particular embodiments, the disclosure features a base editor system (e.g., a fusion protein or complex comprising a programmable DNA binding protein, a nucleobase editor, and gRNA) for modifying a C3 polynucleotide, where the modification is associated with reduced expression, and/or reduced activity of the C3 polypeptide encoded by the polynucleotide. Non-limiting examples of alterations include base edits.

[0005] In one aspect, the disclosure features a method of altering a nucleobase of a complement component 3 (C3) polynucleotide. The method involves contacting the C3 polynucleotide with a base editor system containing one or more guide RNAs, or one or more polynucleotides encoding the one or more guide RNAs, and a base editor containing a nucleic acid programmable DNA binding protein (napDNAbp) domain and a deaminase domain, or one or more a polynucleotides encoding the base editor, thereby altering the nucleobase of the C3 polynucleotide. The method involves (a), (b), (c), (d), and/or (e). In (a), the one or more guide RNAs targets the base editor to effect an alteration of a nucleobase of the C3 polynucleotide that disrupts a splice site in the C3 polynucleotide. In (b), the deaminase domain is a TadA variant (TadA*) containing a combination of alterations listed in Table 5A, 5B, 5C, 5D, 5E, 6A, 6B, 6C, 6D, 6E, 6F, or 7, where the TadA* is not TadA*7.9 or TadA*7.10, and/or where the TadA* variant is a TadA*8.8, TadA*8.17, or TadA*8.20 variant comprising one or more of the amino acid alterations V82T, Y147T, and Q154S. In (c), the one or more guide RNAs contain a nucleic acid sequence containing at least 10-23 contiguous nucleotides of a spacer nucleic acid sequence listed in any one of Tables 1A, 1B, 1C, 1D, 1E, 1F, and 2. In (d), the one or more guide RNAs targets the base editor to effect an alteration of a nucleobase in a codon encoding an amino acid residue selected from one or more of A741, S742, H743, A747, L746, R748, S749, I1125, H1126, Q1127, and E1128 relative to the following reference sequence:

C3 amino acid sequence
MGPTSGPSLLLLLLTHLPLALGSPMYSIITPNILRLESEETMVLEAHDAQGDVPVTVTVHDF PGKKLVLSSEKTVLTPATNHMGNVTFTIPANREFKSEKGRNKFVTVQATFGTQVVEKVVLVS LQSGYLFIQTDKTIYTPGSTVLYRIFTVNHKLLPVGRTVMVNIENPEGIPVKQDSLSSQNQL GVLPLSWDIPELVNMGQWKIRAYYENSPQQVFSTEFEVKEYVLPSFEVIVEPTEKFYYIYNE KGLEVTITARFLYGKKVEGTAFVIFGIQDGEQRISLPESLKRIPIEDGSGEVVLSRKVLLDG VQNPRAEDLVGKSLYVSATVILHSGSDMVQAERSGIPIVTSPYQIHFTKTPKYFKPGMPFDL MVFVTNPDGSPAYRVPVAVQGEDTVQSLTQGDGVAKLSINTHPSQKPLSITVRTKKQELSEA EQATRTMQALPYSTVGNSNNYLHLSVLRTELRPGETLNVNFLLRMDRAHEAKIRYYTYLIMN KGRLLKAGRQVREPGQDLVVLPLSITTDFIPSFRLVAYYTLIGASGQREVVADSVWVDVKDS CVGSLVVKSGQSEDRQPVPGQQMTLKIEGDHGARVVLVAVDKGVFVLNKKNKLTQSKIWDVV EKADIGCTPGSGKDYAGVFSDAGLTFTSSSGQQTAQRAELQCPQPAARRRRSVQLTEKRMDK VGKYPKELRKCCEDGMRENPMRFSCQRRTRFISLGEACKKVFLDCCNYITELRRQHARASHL GLARSNLDEDIIAEENIVSRSEFPESWLWNVEDLKEPPKNGISTKLMNIFLKDSITTWEILA VSMSDKKGICVADPFEVTVMQDFFIDLRLPYSVVRNEQVEIRAVLYNYRQNQELKVRVELLH NPAFCSLATTKRRHQQTVTIPPKSSLSVPYVIVPLKTGLQEVEVKAAVYHHFISDGVRKSLK VVPEGIRMNKTVAVRTLDPERLGREGVQKEDIPPADLSDQVPDTESETRILLQGTPVAQMTE DAVDAERLKHLIVTPSGCGEQNMIGMTPTVIAVHYLDETEQWEKFGLEKRQGALELIKKGYT QQLAFRQPSSAFAAFVKRAPSTWLTAYVVKVFSLAVNLTIAIDSQVLCGAVKWLILEKQKPDG VFQEDAPVIHQEMIGGLRNNNEKDMALTAFVLISLQEAKDICEEQVNSLPGSITKAGDFLEA NYMNLQRSYTVAIAGYALAQMGRLKGPLLNKFLTTAKDKNRWEDPGKQLYNVEATSYALLAL LQLKDFDFVPPVVRWLNEQRYYGGGYGSTQATFMVFQALAQYQKDAPDHQELNLDVSLQLPS RSSKITHRIHWESASLLRSEETKENEGFTVTAEGKGQGTLSVVTMYHAKAKDQLTCNKFDLK VTIKPAPETEKRPQDAKNTMILEICTRYRGDQDATMSILDISMMTGFAPDTDDLKQLANGVD RYISKYELDKAFSDRNTLIIYLDKVSHSEDDCLAFKVHQYFNVELIQPGAVKVYAYYNLEES CTRFYHPEKEDGKLNKLCRDELCRCAEENCFIQKSDDKVTLEERLDKACEPGVDYVYKTRLV KVQLSNDFDEYIMAIEQTIKSGSDEVQVGQQRTFISPIKCREALKLEEKKHYLMWGLSSDFW GEKPNLSYIIGKDTWVEHWPEEDECQDEENQKQCQDLGAFTESMVVFGCPN (SEQ ID NO: 796), or a corresponding position in another C3 polypeptide sequence. In (e), the one or more guide RNAs targets said base editor to effect an alteration of a nucleobase in a start codon of the C3 polynucleotide.

[0006] In another aspect, the disclosure features a method of altering a nucleobase of a complement component 3 (C3) polynucleotide. The method involves contacting the C3 polynucleotide with one or more guide RNAs, or one or more polynucleotides encoding the one or more guide RNAs, and a base editor containing a nucleic acid programmable DNA binding protein (napDNAbp) domain and a deaminase domain, or one or more polynucleotides encoding the base editor, thereby altering the nucleobase of a complement component 3 (C3) polynucleotide. The method further involves (a) and/or (b). In (a), the deaminase domain is selected from one or more of TadA*8.8, TadA*8.13, TadA*8.17, TadA*8.20, TadA*8.8_V82T, TadA*8.8_V82T_Y147T_Q154S, TadA*8.17_V82T, TadA*8.17_V82T_Y147T_Q154S, TadA*8.20_V82T, TadA*8.20_V82T_Y147T_Q154S, rAPOBEC1, and ppAPOBEC. In (b), the one or more guide RNAs contain a spacer corresponding to a guide polynucleotide selected from one or more of gRNA661, gRNA662, gRNA676, gRNA695, gRNA696, gRNA701, gRNA715, gRNA821, gRNA837, gRNA838, gRNA827, gRNA828, gRNA829, gRNA1793, gRNA1798, gRNA3342, gRNA3343, and gRNA3345.

[0007] In another aspect, the disclosure features a method of treating a disease or disorder associated with inappropriate activation of the complement system in a subject in need thereof. The method involves altering a nucleobase of a complement component 3 (C3) polynucleotide in the subject by administering to the subject one or more guide RNAs, or one or more polynucleotides encoding the one or more RNAs, and a base editor containing a nucleic acid programmable DNA binding protein (napDNAbp) domain and a deaminase domain, or one or more polynucleotides encoding the base editor, thereby treating the disease or disorder. The method involves (a), (b), (c), (d), and/or (e). In (a), the one or more guide RNAs targets the base editor to effect an alteration of the nucleobase of the C3 polynucleotide that disrupts a splice site in the C3 polynucleotide. In (b), the deaminase domain is a TadA variant (TadA*) containing a combination of alterations listed in Table 5A, 5B, 5C, 5D, 5E, 6A, 6B, 6C, 6D, 6E, 6F, or 7, where the TadA* is not TadA*7.9 or TadA*7.10. In (c), the one or more guide RNAs contain a nucleic acid sequence containing at least 10-23 contiguous nucleotides of a spacer nucleic acid sequence listed in any one of Tables 1A, 1B, 1C, 1D, 1E, 1F, and 2. In (d) the one or more guide RNAs targets the base editor to effect an alteration of a nucleobase in a codon encoding an amino acid residue selected from one or more of A741, S742, H743, A747, L746, R748, S749, I1125, H1126, Q1127, and E1128 relative to the following reference sequence:

C3 amino acid sequence
MGPTSGPSLLLLLLTHLPLALGSPMYSIITPNILRLESEETMVLEAHDAQGDVPVTVTVHDF PGKKLVLSSEKTVLTPATNHMGNVTFTIPANREFKSEKGRNKFVTVQATFGTQVVEKVVLVS LQSGYLFIQTDKTIYTPGSTVLYRIFTVNHKLLPVGRTVMVNIENPEGIPVKQDSLSSQNQL GVLPLSWDIPELVNMGQWKIRAYYENSPQQVFSTEFEVKEYVLPSFEVIVEPTEKFYYIYNE KGLEVTITARFLYGKKVEGTAFVIFGIQDGEQRISLPESLKRIPIEDGSGEVVLSRKVLLDG VQNPRAEDLVGKSLYVSATVILHSGSDMVQAERSGIPIVTSPYQIHFTKTPKYFKPGMPFDL MVFVTNPDGSPAYRVPVAVQGEDTVQSLTQGDGVAKLSINTHPSQKPLSITVRTKKQELSEA EQATRTMQALPYSTVGNSNNYLHLSVLRTELRPGETLNVNFLLRMDRAHEAKIRYYTYLIMN KGRLLKAGRQVREPGQDLVVLPLSITTDFIPSFRLVAYYTLIGASGQREVVADSVWVDVKDS CVGSLVVKSGQSEDRQPVPGQQMTLKIEGDHGARVVLVAVDKGVFVLNKKNKLTQSKIWDVV EKADIGCTPGSGKDYAGVFSDAGLTFTSSSGQQTAQRAELQCPQPAARRRRSVQLTEKRMDK VGKYPKELRKCCEDGMRENPMRFSCQRRTRFISLGEACKKVFLDCCNYITELRRQHARASHL GLARSNLDEDIIAEENIVSRSEFPESWLWNVEDLKEPPKNGISTKLMNIFLKDSITTWEILA VSMSDKKGICVADPFEVTVMQDFFIDLRLPYSVVRNEQVEIRAVLYNYRQNQELKVRVELLH NPAFCSLATTKRRHQQTVTIPPKSSLSVPYVIVPLKTGLQEVEVKAAVYHHFISDGVRKSLK VVPEGIRMNKTVAVRTLDPERLGREGVQKEDIPPADLSDQVPDTESETRILLQGTPVAQMTE DAVDAERLKHLIVTPSGCGEQNMIGMTPTVIAVHYLDETEQWEKFGLEKRQGALELIKKGYT QQLAFRQPSSAFAAFVKRAPSTWLTAYVVKVFSLAVNLIAIDSQVLCGAVKWLILEKQKPDG VFQEDAPVIHQEMIGGLRNNNEKDMALTAFVLISLQEAKDICEEQVNSLPGSITKAGDFLEA NYMNLQRSYTVAIAGYALAQMGRLKGPLLNKFLTTAKDKNRWEDPGKQLYNVEATSYALLAL LQLKDFDFVPPVVRWLNEQRYYGGGYGSTQATFMVFQALAQYQKDAPDHQELNLDVSLQLPS RSSKITHRIHWESASLLRSEETKENEGFTVTAEGKGQGTLSVVTMYHAKAKDQLTCNKFDLK VTIKPAPETEKRPQDAKNTMILEICTRYRGDQDATMSILDISMMTGFAPDTDDLKQLANGVD RYISKYELDKAFSDRNTLIIYLDKVSHSEDDCLAFKVHQYFNVELIQPGAVKVYAYYNLEES CTRFYHPEKEDGKLNKLCRDELCRCAEENCFIQKSDDKVTLEERLDKACEPGVDYVYKTRLV KVQLSNDFDEYIMAIEQTIKSGSDEVQVGQQRTFISPIKCREALKLEEKKHYLMWGLSSDFW GEKPNLSYIIGKDTWVEHWPEEDECQDEENQKQCQDLGAFTESMVVFGCPN (SEQ ID NO: 796), or a corresponding position in another C3 polypeptide sequence. In (e), the one or more guide RNAs targets said base editor to effect an alteration of a nucleobase in a start codon of the C3 polynucleotide.

[0008] In another aspect, the disclosure features a method of treating a disease or disorder associated with inappropriate activation of the complement system in a subject in need thereof. The method involves altering a nucleobase of a complement component 3 (C3) polynucleotide in the subject by administering to the subject one or more guide RNAs, or one or more polynucleotides encoding the one or more guide RNAs, and a base editor containing a nucleic acid programmable DNA binding protein (napDNAbp) domain and a deaminase domain, or one or more polynucleotides encoding the base editor, thereby treating the disease or disorder. The method further involves (a) and (b). In (a), the deaminase domain is selected from one or more of TadA*8.8, TadA*8.13, TadA*8.17, TadA*8.20, TadA*8.8_V82T, TadA*8.8_V82T_Y147T_Q154S, TadA*8.17_V82T, TadA*8.17_V82T_Y147T_Q154S, TadA*8.20_V82T, TadA*8.20_V82T_Y147T_Q154S, rAPOBEC1, and ppAPOBEC. In (b), the one or more guide RNAs contain a spacer corresponding to a guide polynucleotide selected from one or more of gRNA661, gRNA662, gRNA676, gRNA695, gRNA696, gRNA701, gRNA715, gRNA821, gRNA837, gRNA838, gRNA827, gRNA828, gRNA829, gRNA1793, gRNA1798, gRNA3342, gRNA3343, and gRNA3345.

[0009] In another aspect, the disclosure features a cell produced by the method of any aspect of the disclosure, or embodiments thereof.

[0010] In another aspect, the disclosure features a base editor system containing a base editor containing a nucleic acid programmable DNA binding protein (napDNAbp) domain and a deaminase domain, or one or more polynucleotides encoding the base editor, and one or more guide polynucleotides, or one or more polynucleotides encoding the one or more guide polynucleotides, where the one or more guide polynucleotides contain at least 10, 11, 12, 13, 14, 15, 16, 17, 18, 19, or 20 contiguous nucleobases of a spacer listed in Table 1A, 1B, 1C, 1D, 1E, 1F, or 2.

[0011] In another aspect, the disclosure features a polynucleotide or a set of polynucleotides encoding the base editor, base editor system, or component thereof, of any aspect of the disclosure, or embodiments thereof.

[0012] In another aspect, the disclosure features a kit containing the base editor system or base editor of any aspect of the disclosure, and/or one or more polynucleotides encoding the same or components thereof, or embodiments thereof.

[0013] In another aspect, the disclosure features a lipid nanoparticle containing the base editor system or base editor of any aspect of the disclosure, and/or one or more polynucleotides encoding the same or components thereof, or embodiments thereof.

[0014] In another aspect, the disclosure features a kit containing a base editor system containing a base editor or one or more polynucleotides encoding the base editor, where the base editor contains a nucleic acid programmable DNA binding protein domain (napDNAbp), a deaminase domain, and one or more guide polynucleotides, or one or more polynucleotides encoding the one or more guide polynucleotides, where the one or more guide polynucleotides contain least about 10, 11, 12, 13, 14, 15, 16, 17, 18, 19, or 20 contiguous nucleobases of a spacer listed in Table 1A, 1B, 1C, 1D, 1E, 1F, or 2.

[0015] In another aspect, the disclosure features a pharmaceutical composition containing an effective amount of the base editor system of any aspect of the disclosure, or embodiments thereof.

[0016] In another aspect, the disclosure features a pharmaceutical composition containing a base editor system containing a base editor or one or more polynucleotides encoding the base editor, where the base editor contains a nucleic acid programmable DNA binding protein domain (napDNAbp), a deaminase domain, and one or more guide polynucleotides, or one or more polynucleotides encoding the one or more guide polynucleotides, where the one or more guide polynucleotides contain least about 10, 11, 12, 13, 14, 15, 16, 17, 18, 19, or 20 contiguous nucleobases of a spacer listed in Table 1A, 1B, 1C, 1D, 1E, 1F, or 2.

[0017] In another aspect, the disclosure features a guide polynucleotide containing a spacer sequence listed in Table 1A, 1B, 1C, 1D, 1E, 1F, or 2.

[0018] In another aspect, the disclosure features a base editor system containing a base editor containing a nucleic acid programmable DNA binding protein (napDNAbp) domain and a deaminase domain, or one or more polynucleotides encoding the base editor, and one or more guide polynucleotides, or one or more polynucleotides encoding the one or more guide polynucleotides, where
[0019] a) the guide polynucleotide contains a spacer corresponding to gRNA661, the napDNAbp domain is an SpCas9 or an SpCas9 with the amino acid alterations A1283D and E1250K, and the deaminase domain is selected from one or more of TadA*8.8, TadA*8.13, TadA*8.20, TadA*8.8 with the amino acid alteration V82T, TadA*8.8 with the amino acid alterations V82T, Y147T, and Q154S, TadA*8.20 with the amino acid alteration V82T, and TadA*8.20 with the amino acid alterations V82T, Y147T, and Q154S;
[0020] b) the guide polynucleotide contains a spacer corresponding to gRNA676, the napDNAbp domain is an SpCas9, and the deaminase domain is selected from one or more of TadA*8.8, TadA*8.13, TadA*8.8 with the amino acid alterations V82T, Y147T, and Q154S, TadA*8.20 with the amino acid alteration V82T, and TadA*8.20 with the amino acid alterations V82T, Y147T, and Q154S;
[0021] c) the guide polynucleotide contains a spacer corresponding to gRNA696, the napDNAbp domain is an SpCas9 or an SpCas9 with the amino acid alterations A1283D and E1250K, and the deaminase domain is selected from one or more of TadA*8.8, TadA*8.13, TadA*8.20, TadA*8.20 with the amino acid alteration V82T, and TadA*8.20 with the amino acid alterations V82T, Y147T, and Q154S;
[0022] d) the guide polynucleotide contains a spacer corresponding to gRNA715, the napDNAbp domain is an SpCas9 or an SpCas9-VRQR, and the deaminase domain is selected from one or more of TadA*8.8, TadA*8.13, and TadA*8.20 with the amino acid alteration V82T;
[0023] e) the guide polynucleotide contains a spacer corresponding to gRNA821, the napDNAbp is an SpCas9, the deaminase domain is a cytidine deaminase domain, and the base editor further contains two uracil glycosylase inhibitors;
[0024] f) the guide polynucleotide contains a spacer corresponding to gRNA827, the napDNAbp is an SpCas9, and the deaminase domain is TadA*8.8;
[0025] g) the guide polynucleotide contains a spacer corresponding to gRNA828, the napDNAbp is h) an SpCas9, and the deaminase domain is TadA*8.8;
[0026] h) the guide polynucleotide contains a spacer corresponding to gRNA829, the napDNAbp is an SpCas9, and the deaminase domain is TadA*8.8;
[0027] i) the guide polynucleotide contains a spacer corresponding to gRNA837, the napDNAbp is an SpCas9-VRQR, and the deaminase domain is TadA*8.8;
[0028] j) the guide polynucleotide contains a spacer corresponding to gRNA838, the napDNAbp is an SpCas9-VRQR, and the deaminase domain is TadA*8.8;
[0029] k) the guide polynucleotide contains a spacer corresponding to gRNA3342, the napDNAbp is an SpCas9, and the deaminase is selected from one or more of TadA*8.8, TadA*8.13, TadA*8.20, TadA*8.8 with the amino acid alterations V82T, Y147T, and Q154S, TadA*8.17 with the amino acid alteration V82T, TadA*8.17 with the amino acid alterations V82T, Y147T, and Q154S, TadA*8.20 with the amino acid alteration V82T, and TadA*8.20 with the amino acid alterations V82T, Y147T, and Q154S;
[0030] l) the guide polynucleotide contains a spacer corresponding to gRNA3343, the napDNAbp is selected from one or more of
   [0031] i) SpCas9-MQKFRAER;
   [0032] ii) SpCas9-MQKFRAER with the combination of amino acid alterations I322V, S409I, E427G, R654L, R753G, R1114G, and R1337K;
   [0033] iii) SpCas9-MQKFRAER with the combination of amino acid alterations I322V, S409I, E427G, R654L, R753G, R1114G, Q1136Y, A1283D, and E1250K; and
   [0034] iv) SpCas9-MQKFRAER with the combination of amino acid alterations I322V, S409I, E427G, R654L, R753G, and R1114G; and the deaminase domain is TadA*8.20 or TadA*7.10; or
[0035] m) the guide polynucleotide contains a spacer corresponding to gRNA3345, the napDNAbp domain is an SaCas9-KHH, the deaminase domain is a cytidine deaminase domain, and the base editor further contains two uracil glycosylase inhibitors.

[0036] In another aspect, the d features a method for altering a nucleobase of a complement component 3 (C3) polynucleotide. The method involves contacting the C3 polynucleotide with the base editor system of any aspect of the disclosure, or embodiments thereof.

[0037] In another aspect, the disclosure features a method of treating a disease or disorder associated with inappropriate activation of the complement system in a subject in need thereof. The method involves altering a C3 polynucleotide in the subject by administering to the subject the base editor system of any aspect of the disclosure, or embodiments thereof.

[0038] In any aspect of the disclosure, or embodiments thereof, the splice site corresponds to any one of the protospacers listed in Table 1A, 1B, or 1C.

[0039] In any aspect of the disclosure, or embodiments thereof, the base editor is selected from one or more of ABE8.8, ABE8.13, ABE8.17, ABE8.20, ABE8.8_V82T, ABE8.8_V82T_Y147T_Q154S, ABE8.17_V82T, ABE8.17_V82T_Y147T_Q154S, ABE8.20_V82T, ABE8.20_V82T_Y147T_Q154S, BE4, and those base editors listed in Tables 1A, 1B, 1C, 1D, 1E, 1F, 2, and 28-15.

[0040] In any aspect of the disclosure, or embodiments thereof, the one or more guide RNAs or guide polynucleotides targets the base editor to effect an alteration of a nucleobase in a codon encoding an amino acid residue selected from one or more of A741, S742, H743, A747, L746, R748, S749, I1125, H1126, Q1127, and E1128 relative to the following reference sequence:

C3 amino acid sequence
MGPTSGPSLLLLLLTHLPLALGSPMYSIITPNILRLESEETMVLEAHDAQGDVPVTVTVHDF PGKKLVLSSEKTVLTPATNHMGNVTFTIPANREFKSEKGRNKFVTVQATFGTQVVEKVVLVS LQSGYLFIQTDKTIYTPGSTVLYRIFTVNHKLLPVGRTVMVNIENPEGIPVKQDSLSSQNQL GVLPLSWDIPELVNMGQWKIRAYYENSPQQVFSTEFEVKEYVLPSFEVIVEPTEKFYYIYNE KGLEVTITARFLYGKKVEGTAFVIFGIQDGEQRISLPESLKRIPIEDGSGEVVLSRKVLLDG VQNPRAEDLVGKSLYVSATVILHSGSDMVQAERSGIPIVTSPYQIHFTKTPKYFKPGMPFDL MVFVTNPDGSPAYRVPVAVQGEDTVQSLTQGDGVAKLSINTHPSQKPLSITVRTKKQELSEA EQATRTMQALPYSTVGNSNNYLHLSVLRTELRPGETLNVNFLLRMDRAHEAKIRYYTYLIMN KGRLLKAGRQVREPGQDLVVLPLSITTDFIPSFRLVAYYTLIGASGQREVVADSVWVDVKDS CVGSLVVKSGQSEDRQPVPGQQMTLKIEGDHGARVVLVAVDKGVFVLNKKNKLTQSKIWDVV EKADIGCTPGSGKDYAGVFSDAGLTFTSSSGQQTAQRAELQCPQPAARRRRSVQLTEKRMDK VGKYPKELRKCCEDGMRENPMRFSCQRRTRFISLGEACKKVFLDCCNYITELRRQHARASHL GLARSNLDEDIIAEENIVSRSEFPESWLWNVEDLKEPPKNGISTKLMNIFLKDSITTWEILA VSMSDKKGICVADPFEVTVMQDFFIDLRLPYSVVRNEQVEIRAVLYNYRQNQELKVRVELLH NPAFCSLATTKRRHQQTVTIPPKSSLSVPYVIVPLKTGLQEVEVKAAVYHHFISDGVRKSLK VVPEGIRMNKTVAVRTLDPERLGREGVQKEDIPPADLSDQVPDTESETRILLQGTPVAQMTE DAVDAERLKHLIVTPSGCGEQNMIGMTPTVIAVHYLDETEQWEKFGLEKRQGALELIKKGYT QQLAFRQPSSAFAAFVKRAPSTWLTAYVVKVFSLAVNLTIAIDSQVLCGAVKWLILEKQKPDG VFQEDAPVIHQEMIGGLRNNNEKDMALTAFVLISLQEAKDICEEQVNSLPGSITKAGDFLEA NYMNLQRSYTVAIAGYALAQMGRLKGPLLNKFLTTAKDKNRWEDPGKQLYNVEATSYALLAL LQLKDFDFVPPVVRWLNEQRYYGGGYGSTQATFMVFQALAQYQKDAPDHQELNLDVSLQLPS RSSKITHRIHWESASLLRSEETKENEGFTVTAEGKGQGTLSVVTMYHAKAKDQLTCNKFDLK VTIKPAPETEKRPQDAKNTMILEICTRYRGDQDATMSILDISMMTGFAPDTDDLKQLANGVD RYISKYELDKAFSDRNTLIIYLDKVSHSEDDCLAFKVHQYFNVELIQPGAVKVYAYYNLEES CTRFYHPEKEDGKLNKLCRDELCRCAEENCFIQKSDDKVTLEERLDKACEPGVDYVYKTRLV KVQLSNDFDEYIMAIEQTIKSGSDEVQVGQQRTFISPIKCREALKLEEKKHYLMWGLSSDFW GEKPNLSYIIGKDTWVEHWPEEDECQDEENQKQCQDLGAFTESMVVFGCPN (SEQ ID NO: 796). In any aspect of the disclosure, or embodiments thereof, the nucleobase alteration effects an alteration to an encoded amino acid residue selected from one or more of A741V, S742G, H743R, H743Y, A747V, A747T, L746P, R748G, R748K, S749G, C1010R, C1010Y, Q1013R, I1125M, H1126R, H1126Y, Q1127R, E1128G, and E1128K.

[0041] In any aspect of the disclosure, or embodiments thereof, the editing rate for the base editor system is greater than 35%.

[0042] In any aspect of the disclosure, or embodiments thereof, the guide RNA or guide polynucleotide contains a spacer that contains or contains only from about 19 to about 23 nucleotides. In any aspect of the disclosure, or embodiments thereof, the spacer contains or contains only 21 nucleotides.

[0043] In any aspect of the disclosure, or embodiments thereof, the nucleobase alteration effects an alteration to an encoded amino acid residue, where the alteration disrupts opsonization by C3. In any aspect of the disclosure, or embodiments thereof, the nucleobase alteration disrupts splicing of a C₃ transcript. In any aspect of the disclosure, or embodiments thereof, the nucleobase alteration effects an alteration to an encoded amino acid residue, wherein the alteration disrupts cleavage of the C3 polypeptide by a C3 convertase.

[0044] In any aspect of the disclosure, or embodiments thereof, the C3 polynucleotide is in a cell. In embodiments, the cell is a mammalian cell. In embodiments, the cell is a primate cell. In embodiments, the primate is a human. In embodiments, the cell is a retinal cell or other cell of the eye, a cell of the CNS, or a hepatocyte.

[0045] In any aspect of the disclosure, or embodiments thereof, the one or more guide RNAs or guide polynucleotides target the base editor to effect an alteration of the nucleobase of the C3 polynucleotide that disrupts a splice site in the C3 polynucleotide, where the splice site is selected from one or more of those splice sites corresponding to any of the protospacers listed in Table 1A, 1B, 1C, 1D, 1E, 1F, or 1C.

[0046] In any aspect of the disclosure, or embodiments thereof, the editing rate is greater than 50%.

[0047] In any aspect of the disclosure, or embodiments thereof, C3 activity and/or expression is reduced by at least about 50% as compared to a control subject without the alteration. In any aspect of the disclosure, or embodiments thereof, C3 activity and/or expression is reduced by at least about 60% as compared to a control cell or subject without the alteration.

[0048] In any aspect of the disclosure, or embodiments thereof, the inappropriate activation of the complement system is associated with increased levels of one or more of inflammation, the presence of autoantibodies, neural degeneration, and microthrombosis. In any aspect of the disclosure, or embodiments thereof, the inappropriate activation of the complement system is associated with damage to the central nervous system (CNS), the eyes, the gastrointestinal system, the pulmonary system, the musculoskeletal system, the circulatory system, the integumentary system, blood cells, thyroid, kidney, joints, gastrointestinal system, or transplanted organs. In any aspect of the disclosure, or embodiments thereof, the disease or disorder is selected from one or more of acute antibody-mediate rejection, age-related macular degeneration, allergic bronchopulmonary aspergillosis, allergic neuritis, allergic rhinitis, amyotrophic lateral sclerosis, anaphylaxis, and scleritis, atopic dermatitis, atypical hemolytic syndrome (aHUS), autoimmune hemolytic anemia, Bechet's disease, bronchiolitis, C3 glomerulopathy, central nervous system (CNS) inflammatory disorders, choroidal neovascularization (CNV), choroiditis, chronic allograft vasculopathy, chronic hepatitis, chronic muscle inflammation, chronic pain, chronic pancreatitis, chronic urticaria, Churg-Strauss syndrome, conjunctivitis, cyclitis, demyelinating disease, dermatitis, dermatomyositis, diabetic retinopathy, encephalitis, eosinophilic pneumonia, geographic atrophy, giant cell arteritis, glaucoma, glomerulonephritis, graft or transplant rejection or failure, HELLP syndrome, Henoch-Schonlein purpura, hypersensitivity pneumonitis, idiopathic pulmonary fibrosis (IPF), IgA nephropathy (IgAN), inflammatory bowel diseases, inflammatory joint conditions, inflammatory skin diseases, infusion reactions, interstitial pneumonia, iridocyclitis, iritis, ischemia/reperfusion injury, Kawasaki disease, keratitis, lupus nephritis, membranoproliferative glomerulonephritis (MPGN), meningitis, microscopic polyangiitis, myasthenia gravis, myocarditis, nasal polyposis, neuromyelitis optica, neuropathic pain, ocular inflammation, osteoarthritis, pancreatitis, panniculitis, paroxysmal nocturnal hemoglobinuria (PNH), pars planitis, pemphigoid, pemphigus, polyarteritis nodosa, polymyositis, primary membranous nephropathy, proliferative vitreoretinopathy, proteinuria, psoriasis, pulmonary fibrosis, renal disease, respiratory distress syndrome, retinal neovascularization (RNV), retinopathy of prematurity, rheumatoid arthritis (RA), rhinosinusitis, sarcoid, sarcoidosis, scleritis, scleroderma, sclerodermatomyositis, sclerosis, Sjogren syndrome, systemic lupus erythematosus, systemic scleroderma, Takayasu's arteritis, thyroiditis, thyroidoisis, ulcerative colitis, uveitis, vasculitis, and Wegener's granulomatosis.

[0049] In any aspect of the disclosure, or embodiments thereof, the administration is local administration. In embodiments, the local administration is administration to an eye, to spinal fluid, or to the liver.

[0050] In any aspect of the disclosure, or embodiments thereof, the C3 polynucleotide is contacted with two or more guide RNAs or guide polynucleotides, and where each guide RNA or guide-polynucleotide binds a different location within the C3 polynucleotide. In any aspect of the disclosure, or embodiments thereof, the deaminase is an adenosine deaminase or a cytidine deaminase. In embodiments, the adenosine deaminase converts a target A·T to G·C in the C3 polynucleotide. In embodiments, the cytosine deaminase converts a target C·G to T·A in the C3 polynucleotide.

[0051] In any aspect of the disclosure, or embodiments thereof, the nucleobase alteration results in a premature STOP codon.

[0052] In any aspect of the disclosure, or embodiments thereof, the napDNAbp domain contains a Cas9, Cas12a/Cpfl, Cas12b/C2cl, Cas12c/C2c3, Cas12d/CasY, Cas12e/CasX, Cas12g, Cas12h, Cas12i, or Cas12j/CasΦ polynucleotide or a functional portion thereof. In any aspect of the disclosure, or embodiments thereof, the napDNAbp domain contains a Cas9 polynucleotide or a functional portion thereof having endonuclease activity on both strands of a double-stranded DNA molecule. In any aspect of the disclosure, or embodiments thereof, the napDNAbp domain contains a dead Cas9 (dCas9) or a Cas9 nickase (nCas9). In any aspect of the disclosure, or embodiments thereof, the napDNAbp domain is a modified Staphylococcus aureus Cas9 (SaCas9), Streptococcus thermophilus 1 Cas9 (St1Cas9), a modified Streptococcus pyogenes Cas9 (SpCas9), or a variant thereof. In any aspect of the disclosure, or embodiments thereof, napDNAbp domain contains a variant of SpCas9 having an altered protospacer-adjacent motif (PAM) specificity.

[0053] In any aspect of the disclosure, or embodiments thereof, the cytidine deaminase domain is an APOBEC deaminase domain or a derivative thereof. In any aspect of the disclosure, or embodiments thereof, the adenosine deaminase domain is TadA deaminase domain.

[0054] In any aspect of the disclosure, or embodiments thereof, the guide RNA or guide polynucleotide contains a nucleic acid analog. In any aspect of the disclosure, or embodiments thereof, the guide RNA or guide polynucleotide contains one or more of a 2′-OMe and a phosphorothioate.

[0055] In any aspect of the disclosure, or embodiments thereof, the base editor further contains one or more uracil glycosylase inhibitors (UGIs). In any aspect of the disclosure, or embodiments thereof, the base editor further contains one or more nuclear localization sequences (NLS).

[0056] In any aspect of the disclosure, or embodiments thereof, the napDNAbp is a nuclease inactive or nickase variant.

[0057] In any aspect of the disclosure, or embodiments thereof, the deaminase domain is capable of deaminating cytidine or adenine in DNA. In any aspect of the disclosure, or embodiments thereof, the deaminase domain is a cytidine deaminase domain. In embodiments, the cytidine deaminase is an APOBEC deaminase or a derivative thereof. In any aspect of the disclosure, or embodiments thereof, the deaminase domain is an adenosine deaminase domain. In embodiments, the adenosine deaminase is a TadA*8 variant. In embodiments, the adenosine deaminase is TadA*8.1, TadA*8.2, TadA*8.3, TadA*8.4, TadA*8.5, TadA*8.6, TadA*8.7, TadA*8.8, TadA*8.9, TadA*8.10, TadA*8.11, TadA*8.12, TadA*8.13, TadA*8.14, TadA*8.15, TadA*8.16, TadA*8.17, TadA*8.18, TadA*8.19, TadA*8.20, TadA*8.21, TadA*8.22, TadA*8.23, or TadA*8.24. In any aspect of the disclosure, or embodiments thereof, the deaminase is an adenosine deaminase selected from one or more of TadA*8.8, TadA*8.13, TadA*8.17, TadA*8.20, TadA*8.8_V82T, TadA*8.8_V82T_Y147T_Q154S, TadA*8.17_V82T, TadA*8.17_V82T_Y147T_Q154S, TadA*8.20_V82T, and TadA*8.20_V82T_Y147T_Q154S. In any aspect of the disclosure, or embodiments thereof, the deaminase domain is a monomer or heterodimer. In any aspect of the disclosure, or embodiments thereof, the deaminase domain is selected from one or more of TadA*8.8, TadA*8.13, TadA*8.17, TadA*8.20, TadA*8.8_V82T, TadA*8.8_V82T_Y147T_Q154S, TadA*8.17_V82T, TadA*8.17_V82T_Y147T_Q154S, TadA*8.20_V82T, and TadA*8.20_V82T_Y147T_Q154S, rAPOBEC1, and ppAPOBEC.

[0058] In any aspect of the disclosure, or embodiments thereof, the one or more guide RNAs or guide polynucleotides contain a spacer corresponding to a guide polynucleotide selected from one or more of gRNA676, gRNA661, gRNA715, gRNA821, gRNA837, gRNA838, gRNA827, gRNA828, gRNA829, gRNA3342, gRNA3343, and gRNA3345.

[0059] In any aspect of the disclosure, or embodiments thereof, the napDNAbp domain contains a Cas9 variant. In any aspect of the disclosure, or embodiments thereof, the Cas9 variant contains one or more of the amino acid alterations A1283D and E1250K relative to an SpCas9 reference amino acid sequence. In any aspect of the disclosure, or embodiments thereof, the Cas9 variant contains one or more of the following combinations of amino acid alterations relative to an spCas9 reference amino acid sequence: I322V, S409I, E427G, R654L, R753G, and R1114G; I322V, S409I, E427G, R654L, R753G, R1114G, M1135L, Q1136Y, and R1337K; I322V, S409I, E427G, R654L, R753G, R1114G, M1135L, Q1136Y, R1337K, and A1283D; I322V, S409I, E427G, R654L, R753G, R1114G, M1135L, Q1136Y, R1337K, A1283D, R220A, and R221A; I322V, S409I, E427G, R654L, R753G, R1114G, M1135L, Q1136Y, R1337K, A1283D, R765A, and Q768A; I322V, S409I, E427G, R654L, R753G, R1114G, M1135L, Q1136Y, R1337K, A1283D, R765A, Q768A, K772A, and K775A; I322V, S409I, E427G, R654L, R753G, R1114G, M1135L, R1337K, A1283D, and E1250K; I322V, S409I, E427G, R654L, R753G, R1114G, Q1136Y, A1283D, and E1250K; I322V, S409I, E427G, R654L, R753G, R1114G, Q1136Y, and R1337K; and I322V, S409I, E427G, R654L, R753G, R1114G, and R1337K. In any aspect of the disclosure, or embodiments thereof, the Cas9 variant is a SaCas9-KHH, SpCas9-MQKFRAER, or SpCas9-VRQR.

[0060] In any aspect of the disclosure, or embodiments thereof, the one or more guide RNAs or guide polynucleotides contain a nucleic acid analog. In any aspect of the disclosure, or embodiments thereof, the one or more guide RNAs or guide polynucleotides contains one or more of a 2′-OMe and a phosphorothioate. In any aspect of the disclosure, or embodiments thereof, the one or more guide RNAs or guide polynucleotides contain one of the following nucleotide sequences:

### End-Mod SpCas9 Guide Polynucleotide:

(SEQ ID NO: 943)
mNsmNsmNsNNNNNNNNNNNNNNNNNGUUUUAGAGCUAGAAAUAGCAAG
UUAAAAUAAGGCUAGUCCGUUAUCAACUUGAAAAAGUGGCACCGAGUCG
GUGCUsmUsmUsmU;

### End-Mod SaCas9 Guide Polynucleotide:

(SEQ ID NO: 944)
mNsmNsmNsNNNNNNNNNNNNNNNNNNGUUUUAGUACUCUGUAAUGAAA
AUUACAGAAUCUACUAAAACAAGGCAAAAUGCCGUGUUUAUCUCGUCAA
CUUGUUGGCGAGAUsmUsmUsmU;

### H M01:

(SEQ ID NO: 855)
mNsmNsmNsNNNNNNNNNNNNNNNNNGUUUUAGAmGmCmUmAmGmAmAm
AmUmAmGmCAAGUUAAAAUAAGGCUAGUCCGUUAUCAmAmCmUmUmGmA
mAmAmAmAmGmUmGmGmCmAmCmCmGmAmGmUmCmGmGmUmGmCmUsmU
smUsmU;

### H M07:

(SEQ ID NO: 856)
mNsmNsmNsmNmNmNmNmNmNmNNNNNNNNNNNmGUUUUAGmAmGmCmU
mAmGmAmAmAmUmAmGmCmAmAGUUmAAmAAmUAmAmGmGmCmUmAGUm
CmCGUUAmUmCAAmCmUmUmGmAmAmAmAmAmGmUmGGmCmAmCmCmGm
AmGmUmCmGmGmUmGmCmUsmUsmUsmU;

NLS (bpsv 40):

(SEQ ID NOS: 857)
mNsmNsmNsNNNNNNNNNNNNNNNNNGUUUUAGAGCUAGAAAUAGCAAG
UUAAAAUAAGGCUAGUCCGUUAUCAACUUGAAAAAGUGGCACCGAGUCG
GUGCmUsmUsmUsmU;

### LONG EST:

(SEQ ID NO: 859)
mNsmNsmNsNNNNNNNNNNNNNNNNNGUUUUAGAmGmCmCmGmGmCmGm
GmAmAmAmCmGmCmCmGmGmCAAGUUAAAAUAAGGCUAGUCCGUUAUCA
mAmCmUmUmGmAmAmAmAmAmGUGmGmCmAmCmCmGmAmGmUmCmGmGm
UmGmCmUsmUsmUsmU;

### NLS+LONGST:

(SEQ ID NOs: 860)
mNsmNsmNsNNNNNNNNNNNNNNNNNGUUUUAGAmGmCmCmGmGmCmGm
GmAmAmAmCmGmCmCmGmGmCAAGUUAAAAUAAGGCUAGUCCGUUAUCA
mAmCmUmUmGmAmAmAmAmAmGmUmGmGmCmAmCmCmGmAmGmUmCmGm
GmUmGmCmUsmUsmUsmU;
or

### LONGEST+G OLD:

mNsmNsmNsNNNNNNNNNNNNNNNNNGUUUUAGAmGmCmCmGmGmCmGmGmAmAmAmCmGmC mCmGmGmCAAGUUAAAAUAAGGCUAGUCCGUUAmUmCAAmCmUmUGGACUUCGGUCCmAmAm GUGGmCmAmCmCmGmAmGmUmCmGmGmUmGmCmUsmUsmUsmU (SEQ ID NO: 861). The term “mN” indicates a 2′-OMe modification of the nucleotide “N”, and “Ns” indicates that the nucleotide “N” is linked to the following nucleotide by a phosphorothioate (PS). In any aspect of the disclosure, or embodiments thereof, one or more or the one or more guide RNAs or guide polynucleotides are covalently linked at the 5′ end to a peptide having the following amino acid sequence: CKRTADGSEFESPKKKRKV (SEQ ID NO: 858).

[0061] In any aspect of the disclosure, or embodiments thereof, the base editor contains a linker peptide between the deaminase domain and the napDNAbp domain, where the linker peptide contains the amino acid sequence KGPKPKKEESEK (SEQ ID NO: 940).

[0062] In any aspect of the disclosure, or embodiments thereof, the one or more guide RNAs or guide polynucleotides targets said base editor to effect an alteration of a nucleobase in a start codon of the C3 polynucleotide.

[0063] In any aspect of the disclosure, or embodiments thereof, the method involves administering to the subject a lipid nanoparticle containing the one or more guide RNAs or guide polynucleotides and an mRNA molecule encoding the base editor.

[0064] In any aspect of the disclosure, or embodiments thereof, the method further involves administering to the subject the one or more guide RNAs or guide polynucleotides, or one or more polynucleotides encoding the one or more guide RNAs or guide polynucleotides, and the base editor, or one or more polynucleotides encoding the base editor, a second time. The second administration is about or at least about 1 month, 6 months, or a year after the first administration.

[0065] In any aspect of the disclosure, or embodiments thereof, the napDNAbp domain is a nickase. In any aspect of the disclosure, or embodiments thereof, the polynucleotide encoding the base editor is codon optimized.

[0066] In any aspect of the disclosure, or embodiments thereof, the kit further contains written instructions for the use of the kit in the treatment of a disease or disorder associated with inappropriate activation of the complement system in a subject. In any aspect provided herein, or embodiments thereof, the method is not a process for modifying the germline genetic identity of human beings.

### Definitions

[0067] Unless defined otherwise, all technical and scientific terms used herein have the meaning commonly understood by a person skilled in the art to which this disclosure belongs. The following references provide one of skill with a general definition of many of the terms used in this disclosure: Singleton et al., Dictionary of Microbiology and Molecular Biology (2nd ed. 1994); The Cambridge Dictionary of Science and Technology (Walker ed., 1988); The Glossary of Genetics, 5th Ed., R. Rieger et al. (eds.), Springer Verlag (1991); and Hale & Marham, The Harper Collins Dictionary of Biology (1991). As used herein, the following terms have the meanings ascribed to them below, unless specified otherwise.

[0068] By “complement component 3 (C3) polypeptide” is meant a C3 protein having at least about 85% amino acid sequence identity to Ensembl Accession No. ENSP00000245907, which is provided below, or fragment thereof that is capable of activating the complement system.

>ENSG00000125730:ENST00000245907.11 peptide: ENSP00000245907
pep:protein_coding

(SEQ ID NO: 796)
MGPTSGPSLLLLLLTHLPLALGSPMYSIITPNILRLESEETMVLEAHDAQGDVPVTVTVHDF
PGKKLVLSSEKTVLTPATNHMGNVTFTIPANREFKSEKGRNKFVTVQATFGTQVVEKVVLVS
LQSGYLFIQTDKTIYTPGSTVLYRIFTVNHKLLPVGRTVMVNIENPEGIPVKQDSLSSQNQL
GVLPLSWDIPELVNMGQWKIRAYYENSPQQVFSTEFEVKEYVLPSFEVIVEPTEKFYYIYNE
KGLEVTITARFLYGKKVEGTAFVIFGIQDGEQRISLPESLKRIPIEDGSGEVVLSRKVLLDG
VQNPRAEDLVGKSLYVSATVILHSGSDMVQAERSGIPIVTSPYQIHFTKTPKYFKPGMPFDL
MVFVTNPDGSPAYRVPVAVQGEDTVQSLTQGDGVAKLSINTHPSQKPLSITVRTKKQELSEA
EQATRTMQALPYSTVGNSNNYLHLSVLRTELRPGETLNVNFLLRMDRAHEAKIRYYTYLIMN
KGRLLKAGRQVREPGQDLVVLPLSITTDFIPSFRLVAYYTLIGASGQREVVADSVWVDVKDS
CVGSLVVKSGQSEDRQPVPGQQMTLKIEGDHGARVVLVAVDKGVFVLNKKNKLTQSKIWDVV
EKADIGCTPGSGKDYAGVFSDAGLTFTSSSGQQTAQRAELQCPQPAARRRRSVQLTEKRMDK
VGKYPKELRKCCEDGMRENPMRFSCQRRTRFISLGEACKKVELDCCNYITELRRQHARASHL
GLARSNLDEDIIAEENIVSRSEFPESWLWNVEDLKEPPKNGISTKLMNIFLKDSITTWEILA
VSMSDKKGICVADPFEVTVMQDFFIDLRLPYSVVRNEQVEIRAVLYNYRQNQELKVRVELLH
NPAFCSLATTKRRHQQTVTIPPKSSLSVPYVIVPLKTGLQEVEVKAAVYHHFISDGVRKSLK
VVPEGIRMNKTVAVRTLDPERLGREGVQKEDIPPADLSDQVPDTESETRILLQGTPVAQMTE
DAVDAERLKHLIVTPSGCGEQNMIGMTPTVIAVHYLDETEQWEKFGLEKRQGALELIKKGYT
QQLAFRQPSSAFAAFVKRAPSTWLTAYVVKVFSLAVNLIAIDSQVLCGAVKWLILEKQKPDG
VFQEDAPVIHQEMIGGLRNNNEKDMALTAFVLISLQEAKDICEEQVNSLPGSITKAGDFLEA
NYMNLQRSYTVAIAGYALAQMGRLKGPLLNKFLTTAKDKNRWEDPGKQLYNVEATSYALLAL
LQLKDFDFVPPVVRWLNEQRYYGGGYGSTQATFMVFQALAQYQKDAPDHQELNLDVSLQLPS
RSSKITHRIHWESASLLRSEETKENEGFTVTAEGKGQGTLSVVTMYHAKAKDQLTCNKFDLK
VTIKPAPETEKRPQDAKNTMILEICTRYRGDQDATMSILDISMMTGFAPDTDDLKQLANGVD
RYISKYELDKAFSDRNTLIIYLDKVSHSEDDCLAFKVHQYFNVELIQPGAVKVYAYYNLEES
CTRFYHPEKEDGKLNKLCRDELCRCAEENCFIQKSDDKVTLEERLDKACEPGVDYVYKTRLV
KVQLSNDFDEYIMAIEQTIKSGSDEVQVGQQRTFISPIKCREALKLEEKKHYLMWGLSSDFW
GEKPNLSYIIGKDTWVEHWPEEDECQDEENQKQCQDLGAFTESMVVFGCPN.

[0069] By “complement component 3 (C3) polynucleotide” is meant a nucleic acid molecule encoding a C3 polypeptide, as well as the introns, exons, 3′ untranslated regions, 5′ untranslated regions, and regulatory sequences associated with its expression, or fragments thereof. In embodiments, an C3 polynucleotide is the genomic sequence, cDNA, mRNA, or gene associated with and/or required for C3 expression. Exemplary C3 nucleotide sequences from Homo sapiens are provided below (see Ensembl Accession Nos. ENST00000245907.11 and ENSG00000125730):

>ENSG00000125730:ENST00000245907.11 cds:protein_coding

(SEQ ID NO: 794)
ATGGGACCCACCTCAGGTCCCAGCCTGCTGCTCCTGCTACTAACCCACCTCCCCCTGGCTCT
GGGGAGTCCCATGTACTCTATCATCACCCCCAACATCTTGCGGCTGGAGAGCGAGGAGACCA
TGGTGCTGGAGGCCCACGACGCGCAAGGGGATGTTCCAGTCACTGTTACTGTCCACGACTTC
CCAGGCAAAAAACTAGTGCTGTCCAGTGAGAAGACTGTGCTGACCCCTGCCACCAACCACAT
GGGCAACGTCACCTTCACGATCCCAGCCAACAGGGAGTTCAAGTCAGAAAAGGGGCGCAACA
AGTTCGTGACCGTGCAGGCCACCTTCGGGACCCAAGTGGTGGAGAAGGTGGTGCTGGTCAGC
CTGCAGAGCGGGTACCTCTTCATCCAGACAGACAAGACCATCTACACCCCTGGCTCCACAGT
TCTCTATCGGATCTTCACCGTCAACCACAAGCTGCTACCCGTGGGCCGGACGGTCATGGTCA
ACATTGAGAACCCGGAAGGCATCCCGGTCAAGCAGGACTCCTTGTCTTCTCAGAACCAGCTT
GGCGTCTTGCCCTTGTCTTGGGACATTCCGGAACTCGTCAACATGGGCCAGTGGAAGATCCG
AGCCTACTATGAAAACTCACCACAGCAGGTCTTCTCCACTGAGTTTGAGGTGAAGGAGTACG
TGCTGCCCAGTTTCGAGGTCATAGTGGAGCCTACAGAGAAATTCTACTACATCTATAACGAG
AAGGGCCTGGAGGTCACCATCACCGCCAGGTTCCTCTACGGGAAGAAAGTGGAGGGAACTGC
CTTTGTCATCTTCGGGATCCAGGATGGCGAACAGAGGATTTCCCTGCCTGAATCCCTCAAGC
GCATTCCGATTGAGGATGGCTCGGGGGAGGTTGTGCTGAGCCGGAAGGTACTGCTGGACGGG
GTGCAGAACCCCCGAGCAGAAGACCTGGTGGGGAAGTCTTTGTACGTGTCTGCCACCGTCAT
CTTGCACTCAGGCAGTGACATGGTGCAGGCAGAGCGCAGCGGGATCCCCATCGTGACCTCTC
CCTACCAGATCCACTTCACCAAGACACCCAAGTACTTCAAACCAGGAATGCCCTTTGACCTC
ATGGTGTTCGTGACGAACCCTGATGGCTCTCCAGCCTACCGAGTCCCCGTGGCAGTCCAGGG
CGAGGACACTGTGCAGTCTCTAACCCAGGGAGATGGCGTGGCCAAACTCAGCATCAACACAC
ACCCCAGCCAGAAGCCCTTGAGCATCACGGTGCGCACGAAGAAGCAGGAGCTCTCGGAGGCA
GAGCAGGCTACCAGGACCATGCAGGCTCTGCCCTACAGCACCGTGGGCAACTCCAACAATTA
CCTGCATCTCTCAGTGCTACGTACAGAGCTCAGACCCGGGGAGACCCTCAACGTCAACTTCC
TCCTGCGAATGGACCGCGCCCACGAGGCCAAGATCCGCTACTACACCTACCTGATCATGAAC
AAGGGCAGGCTGTTGAAGGCGGGACGCCAGGTGCGAGAGCCCGGCCAGGACCTGGTGGTGCT
GCCCCTGTCCATCACCACCGACTTCATCCCTTCCTTCCGCCTGGTGGCGTACTACACGCTGA
TCGGTGCCAGCGGCCAGAGGGAGGTGGTGGCCGACTCCGTGTGGGTGGACGTCAAGGACTCC
TGCGTGGGCTCGCTGGTGGTAAAAAGCGGCCAGTCAGAAGACCGGCAGCCTGTACCTGGGCA
GCAGATGACCCTGAAGATAGAGGGTGACCACGGGGCCCGGGTGGTACTGGTGGCCGTGGACA
AGGGCGTGTTCGTGCTGAATAAGAAGAACAAACTGACGCAGAGTAAGATCTGGGACGTGGTG
GAGAAGGCAGACATCGGCTGCACCCCGGGCAGTGGGAAGGATTACGCCGGTGTCTTCTCCGA
CGCAGGGCTGACCTTCACGAGCAGCAGTGGCCAGCAGACCGCCCAGAGGGCAGAACTTCAGT
GCCCGCAGCCAGCCGCCCGCCGACGCCGTTCCGTGCAGCTCACGGAGAAGCGAATGGACAAA
GTCGGCAAGTACCCCAAGGAGCTGCGCAAGTGCTGCGAGGACGGCATGCGGGAGAACCCCAT
GAGGTTCTCGTGCCAGCGCCGGACCCGTTTCATCTCCCTGGGCGAGGCGTGCAAGAAGGTCT
TCCTGGACTGCTGCAACTACATCACAGAGCTGCGGCGGCAGCACGCGCGGGCCAGCCACCTG
GGCCTGGCCAGGAGTAACCTGGATGAGGACATCATTGCAGAAGAGAACATCGTTTCCCGAAG
TGAGTTCCCAGAGAGCTGGCTGTGGAACGTTGAGGACTTGAAAGAGCCACCGAAAAATGGAA
TCTCTACGAAGCTCATGAATATATTTTTGAAAGACTCCATCACCACGTGGGAGATTCTGGCT
GTGAGCATGTCGGACAAGAAAGGGATCTGTGTGGCAGACCCCTTCGAGGTCACAGTAATGCA
GGACTTCTTCATCGACCTGCGGCTACCCTACTCTGTTGTTCGAAACGAGCAGGTGGAAATCC
GAGCCGTTCTCTACAATTACCGGCAGAACCAAGAGCTCAAGGTGAGGGTGGAACTACTCCAC
AATCCAGCCTTCTGCAGCCTGGCCACCACCAAGAGGCGTCACCAGCAGACCGTAACCATCCC
CCCCAAGTCCTCGTTGTCCGTTCCATATGTCATCGTGCCGCTAAAGACCGGCCTGCAGGAAG
TGGAAGTCAAGGCTGCTGTCTACCATCATTTCATCAGTGACGGTGTCAGGAAGTCCCTGAAG
GTCGTGCCGGAAGGAATCAGAATGAACAAAACTGTGGCTGTTCGCACCCTGGATCCAGAACG
CCTGGGCCGTGAAGGAGTGCAGAAAGAGGACATCCCACCTGCAGACCTCAGTGACCAAGTCC
CGGACACCGAGTCTGAGACCAGAATTCTCCTGCAAGGGACCCCAGTGGCCCAGATGACAGAG
GATGCCGTCGACGCGGAACGGCTGAAGCACCTCATTGTGACCCCCTCGGGCTGCGGGGAACA
GAACATGATCGGCATGACGCCCACGGTCATCGCTGTGCATTACCTGGATGAAACGGAGCAGT
GGGAGAAGTTCGGCCTAGAGAAGCGGCAGGGGGCCTTGGAGCTCATCAAGAAGGGGTACACC
CAGCAGCTGGCCTTCAGACAACCCAGCTCTGCCTTTGCGGCCTTCGTGAAACGGGCACCCAG
CACCTGGCTGACCGCCTACGTGGTCAAGGTCTTCTCTCTGGCTGTCAACCTCATCGCCATCG
ACTCCCAAGTCCTCTGCGGGGCTGTTAAATGGCTGATCCTGGAGAAGCAGAAGCCCGACGGG
GTCTTCCAGGAGGATGCGCCCGTGATACACCAAGAAATGATTGGTGGATTACGGAACAACAA
CGAGAAAGACATGGCCCTCACGGCCTTTGTTCTCATCTCGCTGCAGGAGGCTAAAGATATTT
GCGAGGAGCAGGTCAACAGCCTGCCAGGCAGCATCACTAAAGCAGGAGACTTCCTTGAAGCC
AACTACATGAACCTACAGAGATCCTACACTGTGGCCATTGCTGGCTATGCTCTGGCCCAGAT
GGGCAGGCTGAAGGGGCCTCTTCTTAACAAATTTCTGACCACAGCCAAAGATAAGAACCGCT
GGGAGGACCCTGGTAAGCAGCTCTACAACGTGGAGGCCACATCCTATGCCCTCTTGGCCCTA
CTGCAGCTAAAAGACTTTGACTTTGTGCCTCCCGTCGTGCGTTGGCTCAATGAACAGAGATA
CTACGGTGGTGGCTATGGCTCTACCCAGGCCACCTTCATGGTGTTCCAAGCCTTGGCTCAAT
ACCAAAAGGACGCCCCTGACCACCAGGAACTGAACCTTGATGTGTCCCTCCAACTGCCCAGC
CGCAGCTCCAAGATCACCCACCGTATCCACTGGGAATCTGCCAGCCTCCTGCGATCAGAAGA
GACCAAGGAAAATGAGGGTTTCACAGTCACAGCTGAAGGAAAAGGCCAAGGCACCTTGTCGG
TGGTGACAATGTACCATGCTAAGGCCAAAGATCAACTCACCTGTAATAAATTCGACCTCAAG
GTCACCATAAAACCAGCACCGGAAACAGAAAAGAGGCCTCAGGATGCCAAGAACACTATGAT
CCTTGAGATCTGTACCAGGTACCGGGGAGACCAGGATGCCACTATGTCTATATTGGACATAT
CCATGATGACTGGCTTTGCTCCAGACACAGATGACCTGAAGCAGCTGGCCAATGGTGTTGAC
AGATACATCTCCAAGTATGAGCTGGACAAAGCCTTCTCCGATAGGAACACCCTCATCATCTA
CCTGGACAAGGTCTCACACTCTGAGGATGACTGTCTAGCTTTCAAAGTTCACCAATACTTTA
ATGTAGAGCTTATCCAGCCTGGAGCAGTCAAGGTCTACGCCTATTACAACCTGGAGGAAAGC
TGTACCCGGTTCTACCATCCGGAAAAGGAGGATGGAAAGCTGAACAAGCTCTGCCGTGATGA
ACTGTGCCGCTGTGCTGAGGAGAATTGCTTCATACAAAAGTCGGATGACAAGGTCACCCTGG
AAGAACGGCTGGACAAGGCCTGTGAGCCAGGAGTGGACTATGTGTACAAGACCCGACTGGTC
AAGGTTCAGCTGTCCAATGACTTTGACGAGTACATCATGGCCATTGAGCAGACCATCAAGTC
AGGCTCGGATGAGGTGCAGGTTGGACAGCAGCGCACGTTCATCAGCCCCATCAAGTGCAGAG
AAGCCCTGAAGCTGGAGGAGAAGAAACACTACCTCATGTGGGGTCTCTCCTCCGATTTCTGG
GGAGAGAAGCCCAACCTCAGCTACATCATCGGGAAGGACACTTGGGTGGAGCACTGGCCCGA
GGAGGACGAATGCCAAGACGAAGAGAACCAGAAACAATGCCAGGACCTCGGCGCCTTCACCG
AGAGCATGGTTGTCTTTGGGTGCCCCAACTGA.

>19 dna:chromosome chromosome:GRCh38:19:6677704:6730562: −1 (exon sequences are in bold)

(SEQ ID NO: 795)
AGGGCCTGCGCTGCTGTGGGAGCGAGGTGGGTGCAGCCTGGGTGAGTCTGGGGTAGAGTGGG
CAAGGCCAGGGCTGCTGTGGTTGGGGGGAGTGGGGCGGGGCCTGAGTGGTTCCGGGTAGAGT
GGGTGGGGCCTGCTGCCCTGCAACGCTAGACGCCTCCTCGCTGTCTGCCCCCAGAATGACGG
ACTCTGGGTTCCGGGAAGGCCTCTCCAAAGTCAACAAAACAGCCAGCGGGCGGGAACTGTTA
TGATCACCTCCACATCTCAGACCAAAGGGTCGTCCTCCCCCAGCATTTCTCACTCCTGCCCT
TCTTCCACAGCGTATGTGGGGAGGTGGAGGGGGTCCATGTGGACCAGGCGCCCAGCTCCCCG
GGACCCCGGTTCCCGGACAAGCCCATTTGGAAGAAGAGTCCCTTCCTCCCCCCAAATATTGG
GCAGCCCTGTCCTTACCCCGGGACCACCCCTCCCTTCCAGCTATGTGTACAATAATGACCAA
TCTGTTTGGCTACGCCGTTGTCTTGCCTTTTTGGGGGTTGGGGTCTACACGGAGGTTGTGTT
TACAATGTAGAAACCTGTTTTCGCTGTGTGTGGCGGGGGCGCGGGCACAGGGTCCGTGTCTT
TGTATATTCAATAAATATTCATTCAGTAACCGCTGCATGCAGGGCCCAAAGCCAGGCGCTGG
GACGGAGCGGTCACAAAGACCCACCTGGTCCCAGCCCTAAAGGGGCTCCCAGTGCCCAGAGT
GGGGGTCAGGCAGAGGGACATGTCACCTGGCAGTACCATCACTGGGCCATCAGCGCCGTGAC
GGGAACTGCACAGGGCTCTGACCCGGCCTTGGGGGTCAGGAAAGGTCAGTAGAAACATGGCG
GAAGAGCTCATGCCCAGATGAGGGAACCGCGGGCATGAAAGCTGGGGGCGAGGGGAGAACGG
GGATTTGAAGGCCCCCAAGTGGCTCAGGCTACAGAGGAAAAGAAAGAATAGGCTGGGCGTGG
TGGCTCACGCCTGTAATCCCAGCACTTTGGGGGGCCAAGGCGGACGGATCGTTTGAGGTCAG
GAGGTCGAGACCAGCCTGGTCAACATGGTGAAACCCCGTCTCTACTAAAAATACAAAAATTT
GCCGGGTGTGGTGGCAGGTGCCTGTAATGGCAGCTACTCAGGAGGCTGAAATGGGAGAATCG
CTTGAGCCAGGGAGGCAGAGGTTGCAGTGAGCAGAGATTGCACCATTGCATTCCAGCCTGGG
CAACAGAGCAAGACTCCATCTCAAAACAAATAATAATAATAGAAGCTAACCGGGCACAGTGA
CAAGTGCCTGTAGTAGTTCCAGCTACTCGGAGGTCAGTGCAGGAGTATCACTCAAGCCCAGG
AGTTAAAGACCAGCCAGGGCAACAAGCGAGACCCCATCTCAAGAAAAGAAAAAATAATACGA
GGTAACACAGAGTGATTGCTACGCCACGCTGTCTATTAAGGCTTCTGTGGATTTTAATTTGT
TAAAAAGCCTGTGAGGCACAGAGAGGGTAAGAAACCTCCTTGAGGTCACACAGCTCATGAGT
GAGTGGGAGACTCCCGGCTCAAAGCCAGACACTGACTATATGCATTGCTGCTCCATAGCTAG
ACTCCCTGGGACCAAATCTCTCAGCCTGTTGCCATTTGCTGTGTGACCCTGGATCACTGGCT
TACTCTCTCTGTTTCCTTGCATATAACATGGGGCCTCCTAAGTTTGTTGAGTATCACATACA
ATAGCAGGCACAGCACCCAGCTGCACAGCCTCGACCTGATTTCTAGGGAACCAGCCCTGAAT
CTTGAGGGGCGACTGAGGAATTGGAGATCTGCTTGTGTGCACACTTAAGGGCAGGTTCCCAA
GATGGGTCTCCACCCCCCACCCACCTGCCCTTCAACTAGAGCATCCAGAATGCCTTTTGGAG
CTCGGAGAAGCCTTCCTCGCTGGAGACACAAGCATGGGACAGCGGCAGGGAACAGGGCTGGG
GTGAAGGCTTCCTGTAAGCAGAAACAAATATAGCTGGGGCCCAGATGAATAAATAGCCTGGT
CAGACAAAGAAGGAAGTGGGAGGCATTGCAGACTGGGGAAGTTACATGAACACGGCGGGGAA
GGCTGGGATGGCCCGCGAGGCTGGAGGGGGCAGGAGGAGGGCGAGAGAAGCTGGCAGAGGCC
TAAAGACAGGCAGGCACATGGGGCTTCATCCAGGGGTCCACAGGAGCCATGGAGGAATTTAA
AGCAGGGAGGAGCATGGCCAGAGAGACTGCATGTGCATGCTGCAGTCGGCTGAGTCATGGTC
CCCTCAAAGATGGGCACGTCCAGCCTGTGTGGTGGCTCACACCTGTCATCCCAGCACTTTGG
GAGACCGAGGCAGACGGATCACTTGTCAGGAGTTCAAGACCAGCCTGGCCAACATGGCGAAA
CCCCATCTCTACTAAAAATAAAAAATTAGCTGGGCATGGTGGTGGGCACCTGTAATTCCAGC
TACTCGGGAGGCTGAGGCAGGAGAATCACTTGAACCCAGGAGGTGGAGGTTGTAGTAAGCTG
AGATTGCACCACTGTACTCCAGCCTTGGTGACAGAGCGAGAGACCTGTCTCAAAAAAAAAAA
AAAAAAAAAAAGGTGTGCACGTCTGAATCCTCAAGACCTGTGGATATGATATGTTCTGTCAC
ACGGCAAAAGGGACTTTGTGCATGGGATTAAGGCTCTTAAAATGGGGGAGATTATCTTGGAT
TATCTGGATATGCCCAATATCGTCACAGGGGTCTTTATAAGAGGGAGGTGGGAGGGTCAGAG
TTAAGGAGACTCAGTGACAAAGGCAGAGACTGCAGTGATTCCAAGAAAGGGGCCACGAGCCA
AGGAATGCAGGCGGCTCCTAGACACTGAAAAAGGCGAGGAAATGGGTTCATCTGTTTCCTCC
AGAAGGGAACACAGTCCTGTTGACACCTTGATTTTAGACGTCTGACCTCCAGAACTGTAAGA
TAAGAAACATGTTGTTTTAACGCACCGAGTTTGCAGTCATCTTTTGCTGCAGCAGTTAAGAA
CTCATGCAGTTTAAGGGCACGTACTCTATAGGGCCCAGCTCTCTGAGTTCAGATTCCGGCAC
TTACCAGCCACAGGATCTCGGGCAAGCAGCCAAAGCCTCTGTTTCTTCATCTGTAAAATGGG
GCAATGATAGAACCTATGGCATGTGGCATAAACAAGGGTTAAAATACGTGAAATAGATAAGT
TGCTGCCACCCGCATCTCATAGGCGTTTGTGAGCGTCAGTGCGCTCATGATCGGTCAAAGGA
ATACAAAGGTAGGGTATTTGTTGTTGTTGTTGTTGTCTGAGACAGTCTCGCCCTGTCGCCCA
GGCTGAAGTGCAATAGTGCGATCTCGGCTCACTGCAACCTCCACCTCCTGGGTTCAAGTGAT
TCTCCCACCTCAGCCTCCCGAGTAGCTGGGATTACAGGCATGTGCCACCACGCCCGGCTAAT
TTTGTATTTTTAGTAGAGACGGGGTTTCACCCTGTTGGCCAGGCTGGTCTCAAAATCCTGGC
CACAAGTGATCCACCCATCTCGGCCTCCCAAAGTGCTGGGATTATAGGCATGAGCCACCACG
CCTGGCCCAAAGGTGGATTTTAGAAAGGAAGGAGTCCCCAAGCCAGGCATGGTGACATGCAC
CTTGTAGTCCCAGCTACTCAGGAGGCTGAGGTGGGAGGATTGCTTGAGCCCAGTAGTTTGAG
GCCAGAGTGGGCTATGATGGCACCACTGCACTCCAGCCTGGGCGACAGGGCCATACCCTGCT
TTTAAAAGAGTAAAATAAGGCTGGGCGCGGTGGCTCACGCCTGTAATCCCAGCACTTTGGAA
GGCCCAGATGGGCAGATCATTTGAGGTCAGGAGTTCGAGACCAGCCTGGCCAACATGGTGAA
ACCCCGTCTCTACTAAAAATACAAAAAATTAGCCGGGCGTGGTGGCTGGTGCCTGTCATCCC
AGCTACTTGGGAGGCTGAGGCAGGAGAATTGTTTGAACTCAGGAGGCGGAGTTTGCAGTGAG
CCAAGATCGCACCATTGCACTCCAGCCTGGGCGACAGAGCAAGACTCCGTCTCACAAATAAA
TAAATAAATAAAATTTAGAAAAATAAATTAAATAAATAAAAGTAAAGCGTCCCCAGCTGCTG
CAGAGTAAATGGGCTGGTAAGGAGGAGGCTGGGGCAGAGGTGAGGGCAGAGATCACAGGTGT
GGAGAGGGAGGATAAGCTGGGAGATTCCAGGCAGGGGCTTGGCCAGCAGGTGAATTCTGGGA
ATGAGAGGAAGGAAGGAGTCCAGCCTGGAAGCCTGGTGGGGCCGTCACCCAAGCAAGGCTGG
GGTAGAAGACACGGGTATTTGCAAAAATAAAAATACAGTTCATCAGGAGTTCGAGATCAGCC
TGGCCAACATGGTGAAACCCTGTCTCTACTAAAAATATAAGAATTAGCCAGGTGCGGTGGCG
GGCGCCTGTAATCTCAGCTACTTGGGAGGCTGAGGCAGGAGAATTGCTGGAACCGGGCAGCG
GAGGTTGCAGTGAGCCAAGATCGTGCCATTGCACTCCAGCCCAGGCCGACAACAGCGAGACT
CTGTCTCAAAAAACAAAAACAAAAAGTACAGTTCAAGTGTACTGAGCGCTCAGTATGCGCAG
GGCGCTGGGTTAAGGATTGTTTCCTGGGTGCCACTTGGGACTTCCACTCCAAGACTAGAAAG
GAGGCTGTAGGCTGTGCATCTCCAGTTGATAGATTAGGAACCGAGGCTGGGAGGAGGGGTTG
GACCTTCCCAGGGGCCCTGCAGAGCTGGAATCAAAACCCACTGCTCTCCATTTTCCCAGGGC
GGGAGTCTATAGGGCCCCAGCTTGTTTCTGCTGAGTGTACCAGAGGGAGAGGAGGGAAAGAG
CCATTGTTGCCAGGCAGATAGATTGATTCAGTCAGTCAGGTCAAGGTTAACTTGAATTAATC
AGTAATAGGGTGGAAGAAGGGGATGGCCTTGCTGTGGGTTCTGGAGAAAAATTCTAGGAAAG
CAGCCACCTCAGCCTGGAATTAGACGATGGGATAGGGGTTTCCCAGCTGCTCCCAGGCCTGG
CTGCCCCTTTGTTGGGGAAGGGGAGGGATGGGATATAGGGGACAGTGAGTGAACTCAGGCAG
GTGTGAGCCGGGGGCATCTGGGTCCCCCACCCAGAAATCATTCCCACTTCCTTCCTCTTATT
TTCTTTCTTTTTCCTGTCTTGCTCTGTCATTCAGGCTGGGGGGCAGTGGTGCAGTCATAGCT
CAGTGCAGCCTCTAACTCCTCCTGCCTCAGCCTCCCGAGGAGCTGGGACTGCAGGCACGCCA
CCATGCCCTGCTAATTTTTTTTTTTTTTTCAATTGTAGAGACGAAGTCTCACTGTATTTCTC
AGGCTGGTCTCGAACTCCTGGACTCAAACAATGCTCTCACCTCGGCCTCCCGAAAGTGCTGG
GATTACAAGCACGAGCCACCGCACCCTGGCCCCTTCTCATTTTCCCCTTGCACCCCAGCTAG
GATTGCCAAACAGAATACAGGACGCTCAGTTACATTTGAATTTCAGATAAATAACAACTACT
TTTTCAGTATATGTAGCTTCCAGATAACCCACGAATGGTCAGCCCGGTTGGCCACACTCTCC
CTCCTTGATTCCGGGAATGCTGGGCTGGGTGGGCCTCAAAATGGAAAGTACCCCAACACACA
CCCAGACCTCCTTCTCTCCCTCCCCTGCTGGCTCATCCTTGTGCACTATCCCCCTCCCAAAC
CTCTGGACACCAATGCACATCTCCCAGAAAAAAGTCACGAGGTTCTGAAGAATTCCCGGTCT
CATCTCCCTCCCTCCTTCCCTCCCAGTAGGCTACCATCTGCTCCAGCCTCCAACCCCCTCAC
TTCTCATCCTGCCCCTCCCCTCTGGTCACTTCTTGGAGGTCAGGGTAGGGCCAGACCCTTTC
CAGGTTCAAGTGATTCTCCTGCTTCAGCCTCCCGAGTAGCTGGGATTATAGGCACCTGCCAC
CATGCTCAGCTAATTCTTTGTTGTTGTTGTTTGTTTTGTTTTGTTTTGAGACAGAGTCTCGC
TCTTGTCGCCCAGGCTAGAGTGCAGTGGCACGATCTTGGCTCACTGCAACCTCCGCCTCCCA
GGTTCAAGTAATTCTCCTGCCTCGGCCTCCCCAGTAGCTGGGATTACAGGTGCCCGCCACCA
ATCCTAGTTAATTTTTGTATTTTTAGTAGAGATGGGGTTTCACCATGTTGGCCAGGCTGGTC
TTGAACTCCTGACCTCAGGTGATCCACCCATCTCGGCCTTCCAAAGTGCTGGGATGACAGGT
GTGAGCCACCATGCCTAGCCAGCTAATTTTTGTATTTTTTAGTAGAAACAGGGTTTCACCAT
GTTAGCCAGGCTGGTCTCGAACCCCCGACCTCCAGCGATCCCCCAGCCTCAGCCTCCCAAAG
TGCTGGGATGACAGGCGTGAGCCACCACACCTGGCCCCTCTGAGCCTGGTGGCTTCTAGGCA
TCCTGGTTTCTTTAATTGTCACAACAACCAGAACTATCTTCAGTCGCATTGTTTAGTTGGAT
TAACCGAGGCTCAGAGAAAAGAGGAACCCAGGCTTGCCGCTAGACAGAGGCCAGACAGGAAT
TCCTTCTCAAGGTTGTCAAACCACAGTGCCGAATGCTTGAGTCTAGAATGAAACCAGGAAAT
GGGGTGGCTTGAGGAGAAAGTGGGGGATAGAAGATGGAATGGGGCAATTGGGAGATCCAGTT
TCTTTCCTTTTTTTAATTTTTTTTTTTTTTTTTGGCAACAGGGTCTCTCTCTGTCACCCAGG
CTGGAGTGCAGTGGTGCAATCTCAGCTCACTGCAACCTCTGCCTCCCGGCTTCAAGCGATTC
TCCTGCCTCAGCCTCCTGAGTAGCTGGGATTACAGGCACCCACCACCACGCCTGGCTAATTT
TTGTACTTTCAGTAAAGACGGGGTTTCACCATGTTGGCCAGGCTGGTCTCCAACTCCTGGCC
TCAAGTGATCTGCCTGCCTCGGCCTCCCAAAGTGCTGGGATTACAGACGTGAGCCACTGCGC
CTGGCAAGGGGATGCAGTTTCAAAAGCTGAACCCCAATTCTGGAGAGCAAGCAGGTATTTTC
ATTCTCTCTCCTCCTCCTCCTCCTCTTCCAAAGAGTGTGTCGCAATCAGTGCAGACAGACGC
CAGGTTTGTTCTCATGCTCCACGCCTCCCCCTACCCCTGGCACGGAAAAGAATGTGGTTTAC
AGGAAATCAGAGAAAACTCCCCATTAACCCCTTCAGTGGGGTTTCAGAAACCGCCTCTCCAG
GGATAAGGGGGCCCCACCCACAGACCCTTCTCCTGCCCTCACCATCCACCTCGTATGCCTGG
GCAGCAATGCTGCAGAACGTCAGAGGAATGCCAGTTAAAATGACACCGGCTGCCGGGGTGTG
GTGGCTCACTTCTATAATCCCAGCACTCTGGGAGGCCGAGGTGGGCGGATCACCTGAGGTCA
GGAGTTTGAGACCAGCCTGGCCAACATGGCGAAACCCTTTCTCTACTAAAAATACAAAAAAT
AAAAAATAAAAGAAAAAAAAAATTAGCCAGGTGTAGTGGCGCATGCCTGTGATCCCAGCTCT
TTGGGAGGCTGAGGCAGGAGAATCACTTGAACCCAGGAGGCAGAGGTTGCAGTGAGCTGAGA
TGGCGCCACTGCACTCCACCCTGGGTGACAGCACAAGACTCCATTTAAAAAAACAAAACAAA
ACAAAAAAAATGACACCAGGGTACCAGTTTTCACCCATAAGGCTGGCAAAAATCTTCAAGTT
CATCAACATGCCCTTGTGATGAGGCTGTGGAAGAAACTGACAATTCATTTCATGCAGGGCTC
ATAAGTGTGTAAATCAATACAACTTCTGTGCAGGGGAATTTGGCAATATCTAGCAAGATTAC
CAGTGCATTCAGAGATTGACCCAACATATTTCCTTTCATTGCAACGACAACTCTATGAAGCA
GGTGGTAAGGGTTTCCTTTTCCATGAACAAACTGAGGCTCAGGGCGGTAATCAGTAGCTTAC
CCAAAGATCACAGCTAGTTTCAGAGCTAGAAAATAACGCAGGTTCAAGCTTATTCACTGCAG
AGAGCCTGGTGTGAAGCCACAGATGTCAGTCTCTCCATCAAGAAGAGGCTGGTGGCTGGACA
CAGCGGCTCACGCCTGTAATTCCAACACTTTGGGAGGCCAAGGTAGGTGGGTCACTTGAAGT
CAGGAGTTCAAGACCAGCCTGGCCAACATGGTGAAACCCCTTGTCCACTAAAAATACAAAAA
TTGCCAGACGTGGTGGTGCTCACCTATAATTTCAGCCATTCCGGAGGCTGAGGCAGGAGAAT
TGTTTGAACCCAGGAGGTGGAGGGTGCAGTGAGCTGAGATAGCGCCACTGCCCTCCAGCCTG
GGTGACAGGGCAAGACTCTAAAAAAAAAACACTCAAACAAACAAAATATCCCCCAAAAAGTA
GGAGGCTGGTTACTTTCTCACAATATAACAAGAGGCCTGTAACCTGTAAGAATGAGGCAGTT
CTTTGCTCACTGAGGTGAAATAGCCTCTGAGGTATATTGTTCATGAAAAAACGAAACAAAAC
GAAACCCAAGATTTAACTGAAGAGACCAGGAAGAATAGTATGTGCTATGTGCTGTCCACAGG
GCACAGTAGTTCACACCAGCACTTTGTGAGGCTGCTGCGGGAGGATCACTTGAGCCCAGGAG
TTCAAGACTGGACTGGGCAACATCGTGGGACCCCCATCTCCACAAAAATAAAAAAATTATCC
GGGCATGGTGGCGGCCACCCGTAGTCCCGGCTACTTGGGTGGTTGAGCCAGGATGATCACTT
GACCCCAGGAGGTTGAGGCTGCAGTGAGCTGTGATTGCACCACTGCAATTTAGCCTGAGTGA
CAGAATGAAAAAAAAATTTTTTTAAAGGAAAACACAAAAAGAATATGCTGTCAACAGGGATG
GGAGGAAGACCACCTTTACTGCTATACACATTTGTACCTTTTAGATGTTGATCAATATGAAT
ATATTATACACACAGACACACACACAGACACACACACACACACAAACAATACAATTTAATAT
CCTAAGAGGATATTGACATTAGACAGGTACAAAAGCTCTAGAAATGAGGACTTTCCTCAGTG
ATGACTTTTTTCACCACCAAAGTCACTCAGGCATCCTGACAAGGGTAAGTGAGGGGAGCCTC
CTTGGAAAATAAACTCACTTGGATAGTGAACTCCTGCACATACCTCAAAGCCCATCTGAAAT
GTCCCCTCCTACAGGAAGTTTTCCCTGACCCTCCAAGAAGCAGAGTTCTATTTCACTGGGGA
AAACATTTCTTCTTCTTCTTTTTTTTCCCTGCCCTGCACATGAGCTAGAAAACATTTCATGA
AACTGGGAGTTTCTGTGCTGGGCTCTGTCCCTCCCCCATTCTACTTCCCCTCCCTCAGCATG
GAAGCCTCTGGAAGTGGGGCTCTGACTCCCAGCCTACAGAGAGATTCCTAGGAAGTGTTCGA
CTGATAAACGCATGGCCAAAAGTGAACTGGGGATGAGGTCCAAGACATCTGCGGTGGGGGGT
TCTCCAGACCTTAGTGTTCTTCCACTACAAAGTGGGTCCAACAGAGAAAGGTCTGTGTTCAC
CAGGTGGCCCTGACCCTGGGAGAGTCCAGGGCAGGGTGCAGCTGCATTCATGCTGCTGGGGA
ACATGCCCTCAGGTTACTCACCCCATGGACATGTTGGCCCCAGGGACTGAAAAGCTTAGGAA
ATGGTATTGAGAAATCTGGGGCAGCCCCAAAAGGGGAGAGGCCATGGGGAGAAGGGGGGGCT
GAGTGGGGGAAAGGCAGGAGCCAGATAAAAAGCCAGCTCCAGCAGGCGCTGCTCACTCCTCC
CCATCCTCTCCCTCTGTCCCTCTGTCCCTCTGACCCTGCACTGTCCCAGCACCATGGGACCC
ACCTCAGGTCCCAGCCTGCTGCTCCTGCTACTAACCCACCTCCCCCTGGCTCTGGGGAGTCC
CATGTGAGTGGTTATGACTCTACCCACAAACAGGGCTGGTTCTGGGGTGGAAGCAGACATTT
GGGGGTCCAGGTCCCTGTAGAATTCAGGGTGCATTTGGGTGTTTGTGGATTCAGGGGTTAGC
AGGTTGGGAATGATTATATATATTTGGGCTGCCTGTGAGTTTGGGTGTTTGTGGTTGGGTGT
TTGTGGAATCCAGGTATCATGGAATTGGAGTTTATATACATTTGGGCTGCCTGTGAGTTTGG
GTGTTTGTGGTTGGGTGTTTGTGGAATCCAGGTATCGTGGAATTGGAGTTTATATACATTTG
GGCTGCCTGAGAGTTTGGGTGTTTATGGGTTGGGTGTTTGTGGAATCCAGGTATGGTGGAAT
TGGAGTTTGGGATGTTTCTAGAATTGAGGTCATCTGTTGGTTTAGGGTGTATGTGGTGTTCA
TTGATGGTGCGGTTGGGGGTGTTTGGAGACTCGGAGGTTTGGACTTTACAAGATTTGGGAGT
TTGCAGCTTGGGGACTTGCAATTTTCAGTGTGGGTTTAAAGATTGGCTACTTCGGGTTCATG
TATAGTTGGGGCATTTGGAATTGATTGTATTTATTAGGACTGGGGTGTTGGAGGTTTAGGCT
GGGTTTGGGGTGCTCTAAGATTTGAGGTTTAGAGGTTTTGGCGTATGTGGGTTTGGGTAGGT
AGAGTTGAGGGTGTCCGGGAGTTTGAGTGTTTACATATTTGGAGTGTTTAGAGAGGTAGAGG
TTTAGGGTTTGGGGCATGTGTGGGTTTAGGCGATTGTGGGTCTGGAAGTCCAGAGACTTGGA
GGAGTTGCTGACGCTGGTTGGAAGGTTCAGGGTTTGGTGGGATGTGTGGCCCCCTCGTTGCC
CAGGCTTTCAAAGGCCAGGCCCAGCTGGCTGAGAGTGGGAGTCATGGTGGCTGCTGTCCTGC
CCATGTGGTTGAGACGGTGGCAGTGCCCAGAGAAGATAATGGCATTGGCAAGTGCGCCGGCA
GTCACTGGATCCTCTCCAGGACCAGAGGCTGGGGCACACAGCCTGCCAGGCGCTGACTCCAG
TGAGGACTGGCGTCTCACATCCGTGGAATGACAAGCCCACTCCCGTGCCCCACTCCGACAGG
TACTCTATCATCACCCCCAACATCTTGCGGCTGGAGAGCGAGGAGACCATGGTGCTGGAGGC
CCACGACGCGCAAGGGGATGTTCCAGTCACTGTTACTGTCCACGACTTCCCAGGCAAAAAAC
TAGTGCTGTCCAGTGAGAAGACTGTGCTGACCCCTGCCACCAACCACATGGGCAACGTCACC
TTCACGGTGAGTGCAGACTGGCGCAGGACCCGGCTGACACCCACAGCCACGCCCACTCCCCC
CCTCCTCCTGAGCCCCTCCCCTTCTGTCTTCTCCCTTTCTAAGCCCTGCCCTTCCCTGAGAC
TCCACCCCTTCGGAGTCGCCTCTCCTTCTAAGCCCCTCCCTTCTCTGAGACTCCACCCCTTC
TGAGTCTCCTCCCCTTATAAGCCCCTCCCTTTTCTGAGACCCCCCCCCACCCCTTCTGAATC
TCCTCCCCTTCTAAGCCCTGACCTTCCCTGAGACCCCACCCCTTCTGAGACTCCTCCCCTTC
TGAGTCCCTCCCTTCCCTGAGACCCCACCCCTTCTGAGGTTCCTCCCCTTCTCTGAGACTCC
ACCCCTTCTGAGTCTCCTCCCCCTCTAAGTCCCTCCCACTGAATTCCTTTTCCAAGCCCCTC
CCCCTCGAAGTCTCCTCTTCTGAACTCCTCCCCTCTTAGTCTCCATCACTTTCTAAGTTCCC
TCACCTGAGTCCCTCCCCCTTTCTGAGCCCCTCCCATGTCAGCCCCTTCCCTTTCTGAGTCC
CCGCCCCTTCTGAGCCCCTCCTCCTATAAGCTCTCTCCTCCTTGTGAGCTCTTCTTTTTGAG
TTCCCTCCCTGGTCCCCCCTCTCCCCTCGCACCTCCTTCACATGCCCCTCCCTCCCCAAAAC
GGCCACCTCGGAAGACCAAGAATAATGGGCAGGCAAGGAGGGACCCAGCCCAAGATCCGGAA
GCTGGACCGTGGGCATGGGGCCTTGGAACAGACCCCTGACAATGCCCTGCCCACGCCTAGAT
CCCAGCCAACAGGGAGTTCAAGTCAGAAAAGGGGCGCAACAAGTTCGTGACCGTGCAGGCCA
CCTTCGGGACCCAAGTGGTGGAGAAGGTGGTGCTGGTCAGCCTGCAGAGCGGGTACCTCTTC
ATCCAGACAGACAAGACCATCTACACCCCTGGCTCCACAGGTGAGGCTGGGGGCGGCTGGAG
AGGGCGGGGCACCGGCGTGGGCGGGCTAGGGTCTCACGAGGCCTCTTTGTCTCTCCCCAGTT
CTCTATCGGATCTTCACCGTCAACCACAAGCTGCTACCCGTGGGCCGGACGGTCATGGTCAA
CATTGAGGTGCCAGCCAGAGGGGGCCCCAGGGGAAGCAGGGGCACAGGCTTAGGAGAGGCAA
AGAGATCGAGAGAGACAGAGAAAGACACACCGGAAGGGGTGCAGTGGCAGAGACACAGAGGC
AAAGAGATATGCAGACACACACCCACACAACACACACACATACAGCACACAACATGCACACA
CACAGCACACAATACACACACAGAGGCAAAGAGATATGCAGACACATGTGCACACACAATGC
ACACACACAATGCAACACACACAAACACACAACATACACGACCACACAACACACACAACACA
ACACACAACACAATACACACAGCACAACGTGCATGACCACACACACAACACACAACACACAC
AACACAATACACAACATACACAACCACGCAATACACACAAAACACACACAACACAACACAAC
ATACATAACCACACCACACACAACACACAACCACACAACACTATCACACAACACACACAAAC
ACACACAACACACAACACACACAACACACACAAAACACAACACACACACAACATACACAACC
ACACAACACACAACCACACAACATACACGACCACACAACACAGTGCACACAAACATAGCACA
CACAACACACAACCCAACACACAACCACACAATACACCATATGGCGCGCACACACACACACA
CACACACACAGGCTGAGAGACAAGGTGGAGATCCAGGGAGACCCCAGGGAGCAGTGCAGGTG
TCCGTGGATTCTGCTTTCAGTTAAACCCCTGATCACTTCACCTCCCTGAGCCTCAGTTACCT
TATCTGAATATCGGGATCATGACGGATAATTGTATGTCATCTATTCTACCGACGGCAGCCAG
AGGACGCCTGTGAGCACCTGAGTCAGGGCCCATCCCTGCTCTGCCTACAGCCCTCCATGGCT
CCCACCTTCCTATGCGTCAAAGCCCAAGTCCTCCCTGCAGTCCACAAGGCCCTGCACACCTT
GCCCTGTCCCTTCCCTGCCCTCCCCTCCTCCCTCTCTCCCCCTCGTTCACTCTTCTGGAGCC
ACACGGGCCATCCTCCCTGTTCCTCCAACACCCAGGTGCAGTCCTGCCTTGGCGCCTTGGCA
CGGGCTGTGCCCTCTTCTCAAGAAAACCCTCTTCTTCCAAATATCCACACAGCTTGTTCTCT
CTCCTCCTTTAAGTCTTTGCTCAAATGTCACCAATGTCTCAATTTTACAATGAGGTCTCTCT
GAGTAACCTATAAAGTCGCAAATACCCACCCTGAGCGTCCCCCCTCCCCGCTACACACACTC
CTCCTTCCTGCCATGTCCTGCAAATGAGATTTATTCATTTGATAATTGCTTCTCCCATCGCC
TCGCCCTCTATTGAACCTAAATCCCTCCAGGAAGGAATTGTTATGTTTGTTGAGGGTTTTGT
CACCTGAACTCAGCACAATGCTGGTATATAGTTGGGTTTAATAAAAAACTTACTGGAAGAAG
CGAGAAGGATGGGAGGAGAGAAGGGGAAGGAGGGTGTTCTCATAGAATTATCATGAGGATGT
GTTGAAATCATACAAGGCTAGGTGCAGTGGCTCACACTTGTAATCCCAGCTGTTTGGGAGGC
CAAGGCGGGAGGATCGCTTGAGCCCAAGAGTCCAAGACCAGCCTGGGCAACACAGCCAGACC
CTGTCTCTACAAAAAAGAAAAGTTAAAAACAAACAAAAAAACAGCTGTGTGTGGTGGTGCTT
GCTTGTGGTTGCAGCTACCCCAGGAGGCTGAGGCAGGAGGATCACTTGAGCCCAGGAATTCC
AGGCTGCAGTGAGCCGTGATCGCACCACTGCACTCCAGCCTGGGTGGCAGAGTGAGACCCTG
TCTCAAAAAATAATTGGGGCAAATGCAATGGCTCAAGCCTGTAATTCCAACATTTCGGGAGG
CAGAGGTGGGAAGACTGCTCGAGGCCAAGAGTTCAAGACCAGCCTGGGAAAGCTAGGGAGAC
TACATCTCTACAAAAAAAATGTAAAAATTATCTAGATTTAGGGATTGATGTGGTCTGTGGGG
AACAGAGACCACACATCTCTTGTAAAGGCACAACAGTTGCCCAGCTCCAATTAGATGTCTCC
TGCTAACCAGAGTACACTATCCACAGAAATTTCCTTGTTTCCAACAGAAGCTAGAAAAACAG
ATTTTTGGCCAGGTGCAGTGGCTCACTCCTATAATCCCAGCACTTTGGGAGGTGGAGGCGGG
CAGATCACGAGGTCAGGAGATCGAGACCATCCTGGCTAACACGGTGAAACCCCGTCTTTATT
AAAAGTACAAAAAAAAAATTAGCTGGGCGTGGTGGCGGGCACCTGTAGTCCCAGCTACTCGA
GAGGCTGAGGCAGGAGAATGGTGTGAACCCGGGAGGCGGAGCCTGCAGTGAGCCGAGATCTC
GCCATTACACTCCAGCCTGGGCGACAGAGCAAGACTCCGTCTCAAAAAAAAAAACAAAAAAA
ACAAAAAAAAAACAGATTTTTATATGTTTTAATTCCTAAAGCCAGCTCACGGCCTTCAGATA
TGCCACTTGCCTGATCCCTGTTACCTCTGTACAATTTCTTTTAAACTTATTTATTCATTCAT
TCATTCATTATTATTATTTTTGAGACAGGGTCTCATTCTGTTGCCCAGGCTAGAGTGCAGTG
GCACAATCACAGCTCACTGCAGCATTGACCTCCTGGGCCCAAGCTGTCCTCCTGTCTCAGCC
TCCTGGGTAGCTGGGACCACAGACGTGCGCCACCACATCCAGCTAATTTTAAAAAATTTTTG
TAGAGATGGAGTCTCCCTACATTTCCCAGGCTGGTCTTGAACCCTTGACCTTGAGCAATCTT
CCCACTTCTGCCTCTCAAAGTGCTGGGATTACAGGCTTGAGCCATTGCGCTCGCCCTAATAC
ATTATTTTTTGAGATGGGGTCTCGCTCTTTCACCCAGACTGGAGTGCAGTGGTGCAATGATG
TCTCATGATGTTTAAATGTTGGCAGCAAATGAAATGACACTACTAGTTATTAGTATTCAGAG
AGACACTGAAAAAATGAGCCCCTACTCATATGAACTATGTCCCAAGCCAACACAGTAGGTGC
CATTATAATCTCCTGTTTCAAGATTTGCACATTGAGCACAGAGAGGTTAGGTAACTTGCCCA
GGGTCACACAGCTTGTAAGTGGCACAGTAGAGATTGAAACCTAAGGTTGACTGACTCCGGTC
CTTGTTCTTTTTTTCGAGACAGACTCTCACTCTGTCTCCCAGGCTGGAGTGCAGTGGAGTGA
TCTTGGCTCTCTGCAATCTCCGCCTCCCGGGTTCAAGCGATTCTCCCGCCTCAGCCTCCTGA
GTAGCTGGGATTACGGGTGCCTACCACCATGCCTGGCTAATTTTTGTATTTTTAGTAGAGAC
AGGGTTTCATCACGTTGGCCAGGCTGGTCTTGAACTCCTGACCTCAGGTGATCTGCCCGCCT
CAGCCTCCCAGAGTGCTGGGATGACAGGCGTGAGCCGCTGCGCCCACCTGGGTCCCTGTTCT
TAACCACAGTAGACACTGTGCACAGAGAATGTCCAGACACAGGTCGGGGAGAGCTGAGAGGC
TAAGCCCAGCCTCCGAAGAGCCACTTTATCCTCTATCCTTCCCTCCTGCCTCCCACAGAACC
CGGAAGGCATCCCGGTCAAGCAGGACTCCTTGTCTTCTCAGAACCAGCTTGGCGTCTTGCCC
TTGTCTTGGGACATTCCGGAACTCGTCAAGTATGTCAGGTTCTTGAGGAGGGGGCTCAGGGC
TCCCCTATCCCCGGAGAGGGAGCAGGGGGGCTCCGAGGCCTGAGAGACCACTCATCCGCCCT
CCTCACAGCATGGGCCAGTGGAAGATCCGAGCCTACTATGAAAACTCACCACAGCAGGTCTT
CTCCACTGAGTTTGAGGTGAAGGAGTACGGTAAGAGGAGGAGGGGCTGGGGGGAGTCAGTGC
CCAGAACGCCTGGCCCAGCGCCGGCCCCACCAACGCCATCTCTCCCCCAGTGCTGCCCAGTT
TCGAGGTCATAGTGGAGCCTACAGAGAAATTCTACTACATCTATAACGAGAAGGGCCTGGAG
GTCACCATCACCGCCAGGTGAGGGACTGGGGGTGGGGCCAGGTAAGAGCCAGGTGAGGGACC
AGGTGAAGACCAGGTGGGGGACTGGGGGTGGAGTCAGGTGGGGGGCTGGAGATGGGACCAGG
TGGGGGGCTGGGGGTGGAGTCAGGTGGGGGGCTGGGGGTGGGGAAGGTGGGGGGCTGGGGGT
GGGGCAAGGTGAGGGGCTGGGGGTGGGACCAGGTGGGGGGCTGGGGGGTGGAGTCAGGTGGG
GGCTGGGAGTGGGGAAGGTGGGGGGCTGGGGGTGGGGCCAGGTGAGGGGCTGGAGGTGGGAC
CATGTGGGGGGTGGGAGTGGGGCAAGGTGGGGGGCTGGGGGTGGGGCCAGGTGAGGGGCTGG
AGGTGGGGCCAGGTGAGAGGCCAGCAGTGGGTTGGGGGCTCCAGTCTTCAGCACAGGCAGGA
GAAGCTGGGGGAGATCCCATTCTCCAGGAGGGATGGACCTGAAGCCCTCCTTGTCTGTCCCG
TAGGTTCCTCTACGGGAAGAAAGTGGAGGGAACTGCCTTTGTCATCTTCGGGATCCAGGATG
GCGAACAGAGGATTTCCCTGCCTGAATCCCTCAAGCGCATTCCGGTACCATAGACGGAGGCC
GCTTTGATCCCTGCCCCAGTCCCCGCCACCTCTGAGCCCGCTCCCCTCTCTGAGCCCTCCTC
TCCCTTCTCAGATTGAGGATGGCTCGGGGGAGGTTGTGCTGAGCCGGAAGGTACTGCTGGAC
GGGGTGCAGAACCCCCGAGCAGAAGACCTGGTGGGGAAGTCTTTGTACGTGTCTGCCACCGT
CATCTTGCACTCAGGTGAGGCCCAGTCTGAAGGCCAGGCTCAGGACCACCAAGTGGGCCGGT
CTGAGAGGGGAGACCAGGTCAGAAGAGAAAGCCTAGTCTAAGGAGGGAGGCTCAGAGTGAAA
GTGGGGTTCAGTCTGATGGGGTAGGCCCAGTCTGAGAGGGGAGGCCGAGTATGAAGATGGAT
TCCAGCCTGATGGGGGGAGGCAGGGCCAGTATAAAGGTGGGGTCCGGGCTGATGGGGGCACA
GGCCCAGTATGAAGTCTGTGTCCAGTCTGATGAGGGAGGCAGGGCCAGTATAAAGATGGGTC
CAGTCTGATGGGGGAGGCAGGGCCAGTATAAAGGTGGGGTCCGGTCTGATGGGGGTCACAGG
CCCAGTATGAAGTCTGTGCCAGTCTGATGGAGGAGGCAAGGCCAGTATAAAGGTGGAGTCCA
GTCTGATGGGGGGCACAGGCCCAGTATGAAAGTGGACTCTACTCTGAGGGAGGAGGTCTAGT
CTGAAGTTGGGGTCCATTCTGAGGGAGGAGGTCTAATCCTGAGGGGTGGCCCAGAAGCCTAC
ACTCACAGCTGGTCCCCTCAGGCAGTGACATGGTGCAGGCAGAGCGCAGCGGGATCCCCATC
GTGACCTCTCCCTACCAGATCCACTTCACCAAGACACCCAAGTACTTCAAACCAGGAATGCC
CTTTGACCTCATGGTGAGACCCGGGGGGGGAAGGGGTCCCACTCCTCCCTTCGGGGACACCG
GCCACAGCCCTGAGCCTGCCTGAACTTCCCCCACCTGCACCCCACATCACAGGTGTTCGTGA
CGAACCCTGATGGCTCTCCAGCCTACCGAGTCCCCGTGGCAGTCCAGGGCGAGGACACTGTG
CAGTCTCTAACCCAGGGAGATGGCGTGGCCAAACTCAGCATCAACACACACCCCAGCCAGAA
GCCCTTGAGCATCACGGTGCGTCTGGGCCCAGCCTCGGAACCCCATCACTGGGAAGACGGTA
CAGGGGTTCTGGTGTTTGCACAGTGGGGTCCTGTCATTTGCATACAGATATTCTCATCTGCA
TAGAGAGGTTCTCTCCTGCGCAGAGGGGTCCTGCCATTTGCATAGAGATACTCTCATCTGCA
TAGAGGGGTTCTGTCCTGCACAGTGGGGTCCTGCCATTTGCATAGACATTCTCATTTGCCTA
GAGGGGTTCTGTCCTGCACAGTGGGGTCCTGCCGTCTGCATGGAGGGGTCCGCAGTTTGAGG
AAACAGGAATCTTCCTCTTGCATGCCCTGCTCCTTCCACTTACACGGAGAGGCGCTCCATCC
ACGCACAGTCTTTCCACTCCCATGGGGGAAGGAGCCTGAATCTCACAAGGAGGGTTGTGTAG
TGTTTGGGACAGGCCCATTGTTGTGAGGTGGTCTCAGTTCTCCTGGCTTCTGTGCACGTGGC
TCTGTTGCCCCTCACTGGGAGGGAAGCAAGTCTCATGACAGCTGCGGAGGTTGCAGATGGCC
TCCCAGTCCCTCTGCAGCTCCCAGGCTGCGCACCCCACTTACCCCTCCCTGTGCTCAGCATG
TGCGTGAATTTCCGGTGGCTACCATGAGAAATGGCCACAGCCTAGTGATCTAAAGCAACACA
CATTTATGGGTCTATAGTTTGAGAGGTCAGAAGTCCTGGCTCTGGGGGAAAGTTCGCTCCCT
TGCTTTTTCCAGTGTCGCCAGGGCACCCTAAAGGCCTGGCTCATGGCCCCTTCCTCCACCTT
TAAAGGCAGCAGCATAGCATCTTCCAGTGTCTCTCTTTCTCTCTGTCTCTGTCTCTCCTTTC
TCCCCTGCCCCTGCTTAATAAAGACCCTTATGATTACATTAGCTCCACCTACATAATCCAGG
ATAATGATTCCATCTCCAGATCCCTAACTTAATCCCATCTGCAAAGCCCCTTTTGTTAAGAA
AGGCCACCAATTCCCAGGTCTCAGGGATTCGGGTGTGGGTATCCTCGGGCGGCGACCAGCAG
GCATCCCTCTTTCCCCACCCAGGTGCGCACGAAGAAGCAGGAGCTCTCGGAGGCAGAGCAGG
CTACCAGGACCATGCAGGCTCTGCCCTACAGCACCGTGGGCAACTCCAACAATTACCTGCAT
CTCTCAGTGCTACGTACAGAGCTCAGACCCGGGGAGACCCTCAACGTCAACTTCCTCCTGCG
AATGGACCGCGCCCACGAGGCCAAGATCCGCTACTACACCTACCTGGTCCGTGGCCACCTGG
AAACCTCAGCCCCCGCCTCCTCCTTGTTTCTTCCGCACCCCTGGGACTCCTTCCCCCATCCC
GGATCCCTCCCTGCGTTCCCTGCCACTCACCCTCCCCAGCCTGATGCCAGCCTGTCCCCCCA
GATCATGAACAAGGGCAGGCTGTTGAAGGCGGGACGCCAGGTGCGAGAGCCCGGCCAGGACC
TGGTGGTGCTGCCCCTGTCCATCACCACCGACTTCATCCCTTCCTTCCGCCTGGTGGCGTAC
TACACGCTGATCGGTGCCAGCGGCCAGAGGGAGGTGGTGGCCGACTCCGTGTGGGTGGACGT
CAAGGACTCCTGCGTGGGCTCGGTAAGTGTGCCCTGGGCTCGCTCGCCCCCTCTCCCTCTCC
CTACTCCTCTCTCTCTCTCTCTCTCCCTGTCTCCTCTCTCTCTCTCTCTCCCTTTCTCCTTT
TCTCTCTCCTTTCTCTCTCTTCTCTTCCTCTCCCTTTCTCTCCTCCCTCTCTGTCTCTCAAC
TGTCTCTCTTTTTATCTCTCTTTCCCTCTCTCTACATCTCTCTTTCCCTCTCTCTTTATTTC
TCTTTCCTTCTCTCTCTCCCTCTCTCGATCTCTCTTTCTCTCCATCTCTCTCCTTTTCTCTC
TCCCTCTCTCTCTCCTTTTCTCTCTCCCTGTCTCTTTCCCTTTCCCTCTCTCTCCCCTCTCT
TTCTCTCCCTCTCTCTTTCCCTCTCCCTCTCTCTCTCCCTTTCTCTCTCTCCCTCTCTCTCC
TTCTCTCTCCCTCTTTCTCTCCTTCTCTCTTTCCCTCTCTCTCTCCCTCTCTCTTTCCCTCT
CTCTCCCTCTCCCTTTCTCTCCCTCTTTCCCTTTCCCTCTCTCCCCCCTCACTCTCCCTCTC
TCTGTCTCTCCGTCTCTCTCCCTCTCTCCCTGTCTCTCCGTCTCTCTCCCTGTCTCTCCCTT
TCTCTCTCTCTCCCGCCCTCTCTCCCTCTCTCTCCCTCCCTCTCTCCCTTTCTCTCTCTCTC
CCTCTCTCTCCCCCTCCCCAGCCCCACGGCTCCCCCCAACCTTTCTGTCTTTCCACTCTAGC
CCAGCACCCACTCCATCCCAGGCACTCCTCTCTCCCAGGGCTGACTTCTTTCGGCGTCTCCA
CCCTCCCCACAGCTGGTGGTAAAAAGCGGCCAGTCAGAAGACCGGCAGCCTGTACCTGGGCA
GCAGATGACCCTGAAGATAGAGGGTGACCACGGGGCCCGGGTGGTACTGGTGGCCGTGGACA
AGGGCGTGTTCGTGCTGAATAAGAAGAACAAACTGACGCAGAGTAAGGTAAGGGCCAGTGAC
CCAAGGCTGCTGAGAAGAGGCGGAGGCACGGAGCTGGGGCTGGGGGAGGTGGGTGGGACTGG
AGAGGGCAGTGCAGTGGGGGGCATGCGCTGAAAGCAGAGATCGGAGCAGACCAGACACAGGG
ATGGTTGAAGCTGAAGATGGGAATGAGGTTGGACATGGGTTCCAATTGGGGATGGTCCTGAG
AATTGGACTTTTTTTTCTGTTTGTTTGTTTGTTTTTGAGACAGAGTCTCTCTCTGTCACCAG
GCTGGAGTGCAGTGGCACAATCTCGGCTCACTGCAACCTCTGCCTCCCAGGTTCAAGCGATT
CTCCTGCCTCAGCTTCCCTAGTAGCTGGGACTACAGGTGCCCATCACCACGCCCAGCTAATT
TTTGTATTTTTAGTGAAGACGGGGGTTTCACCATGTTGGCCAGGATGGTCTCGATCTCTTGG
CCTTGTGATCCACCCGCCTCGACCTCCCAAAGTGTTGGGATTACAGGCGTGAGCCACTGCGC
CCGGCTGAGAATTGGACACTTTCAACTGGGGCCCTGAGAGGCTGGTGGCAGCACACCCAGGG
TCATTCAGTGGGGAAGGTTTCCGGAGTAGGGACGAAGATGGAGATGGGGTTGGCTTGGGATC
AGGAGTGAGGATGGGAATGCAGATGGAATCAGAGGGGAAATGGAGATAAGATTTGGAATGGA
GGCCAGGTGCGGTGGCTCACGTCTGGAATCCCAGCACTTTGGGAGGTCAAGGTGGGAGGATC
ACTTGAGGCCAGGAGTTCAGACCAGCTTGGGCAACATGGCAAGACCCCATCTCTACAGAAAA
AATTTTAAAATAGCTGGGCATGATGGCGCATGCCTGTAGTCCCATCTGCTCAGGAGGCAGAG
GTGCGAGGATTGCTTGAGCCCAGGAATTTGAGGCTGCAGTGAGCTATGCCTGCACCACTGCA
CTCCAGCCTGGGAGACAGTGGAAAATCCCAACTTAAAAAAAAAAAAAAAGAATGGAAAGAAA
GGAGGAAAAAAAAAGAAGAGAGAGAGAAACAGAGAGAAAGAAAAAGAAAGGAGATAAAGAGG
AAGGGAGGGAGGGAGTGAAGAATGAAGGAAGGAAAGAAGGAAGGAAGGAAGGAGGGAAGGAG
GGAAGGAAAGGGGGAGCAAAGGAAGGAGGAAAGGAGGAATGGAGGGAGGAAGGGAGGGAGAG
GAAGGAAGGGAAAGAAAGAAGACAGAAAGAAAAGAAAAAGAAGGCCGGGCATGGTGGCTCAC
TCCTGTAATCCCTTTGGGAGGCCAAGCACTTTGGGAGGCCAAGACAGGCGAATCATTTCAGG
TCAGGAGTTCGAGACCAGCCTGGCCAACATGGTGAAATCCCGTCTCTACTAAATATATAAAA
ATTAGCTGGGCATGGTGGCATGCACCTGTAGTCCCAGATACTCGGGAGGCTGAGGCAGGAAA
ATTGCCTGAACCTGGGAGTTGGAGGTTACAGTGAGCGGAGATCACACCACTGCACTCCAGCC
TGGGTGACAGAGCAAGACTCCATCTCGAAAGAAAGAAAGAGAGAGAGTGAGAAAGAGAAAGA
AAAAGAGAAGGAAGGAGAGAGAAGGAAGGAAGGAAAGAGAAAGAGAAAGGAAGGGCAGAAGC
AGGAATGGGGGAGATGAGAGTGGGACAGGGTGGGGTCATTTGGGAAGAGATACACAGGTGCA
TATGTGGGGGATCCCAATTGTCAGCCTGGCCTCCCTGCGTCCCGCCACCCCTATGCCCCCCG
CAGATCTGGGACGTGGTGGAGAAGGCAGACATCGGCTGCACCCCGGGCAGTGGGAAGGATTA
CGCCGGTGTCTTCTCCGACGCAGGGCTGACCTTCACGAGCAGCAGTGGCCAGCAGACCGCCC
AGAGGGCAGGTGAGGTCGCCACCAGGGGCCGGTGCAGGGACAGACAGCACCTCCACCTCCCA
GATGCTGGGAGCAGAGCTCTGGAAACCGGGGGCCTGGGTTCAAGCCCCGCCTCCACCACCAC
CTAGTAAATCCCTCCCCTCTGAGCCTCAGTTTGCTCTTCCATCAAATGGGAGCAGGAACACC
CCCACCTCACACGATCGTGAGGGGTGAACCGAGGACACCTAGTAGGTGCCTCATCCATCTTC
TTCTCGGTCCGCCTGCCCTGCAGAACTTCAGTGCCCGCAGCCAGCCGCCCGCCGACGCCGTT
CCGTGCAGCTCACGGAGAAGCGAATGGACAAAGGTGGGAGCCTTTCCTACCCACTCCTGCCC
CCGAGCCCCACCCCAGGAGACCCCAGCCCGGCCGTGCAGGAGCCAGAGAGGGAGGAGGGGAG
GCCCTGGCGGCGGGGAAGTCCTCCCTGGGGTCCGTCCCGCGTCCCTCCTGCTGCCGGCCCCC
GGCTGAGGGTGTGGCCTGGGGGAACACGTGCTCCCGCAGTCGGCAAGTACCCCAAGGAGCTG
CGCAAGTGCTGCGAGGACGGCATGCGGGAGAACCCCATGAGGTTCTCGTGCCAGCGCCGGAC
CCGTTTCATCTCCCTGGGCGAGGCGTGCAAGAAGGTCTTCCTGGACTGCTGCAACTACATCA
CAGAGCTGCGGCGGCAGCACGCGCGGGCCAGCCACCTGGGCCTGGCCAGGAGTAGGTCCCAC
GGGGTGGGGACAGGGGGAGGGGGCCGTCTGATGGGGGAGGAGACTCCTGTCTGAGGAGGGAG
GATGCCCTGTCTGGTGGGGGTGGGGCTGGAGGAGGCCGCTGTCTGAGGGGGGAGGAGGCCCC
TGTCTGAGGGGGCAGGAGGTCCCTGTCTCAGGGGGGAGGAGGCCCCTGTCTGAGGAGGGAGG
AAACCTCCGTCTGAGGAGGGAGGAGGTCCCTGTCTGAGGAGGGAGGAGGCCTTGAGGGGGGA
GGAGGTCCCCGTCTGAGGAGGGAGGAGGCCTCTGTCTGAGGAGAGAGGAGGTACCTGTCTGA
GGGGGGAGGAGGCCTCTGTCTGAGGGGGGAGGATGCCCCTGTCTGAGGGGGTAGGAGGAGGC
CTCTGTCTCGGGGGGAGGAGTCCCCTGTCTGAGGAGGGAGGAGGCCTCTGTCTGAGGGGGGA
GGATGCCGCTGTCTGAGAGGGTAGGAGGAGGCCTCTGTCTGTTGGGAGAGGAGGCCCCTGTC
TGAGGGTGATGCCGATGAGGTGATGCCCTGCCAGCGTGAGGTAGAGAAGACCCAGGTCTGAA
GAGGGGAGGATCAAGTCAGAGAAGCGTAGATGCCCATCTGAGATGGAGGAGGCTCCCGTCCG
AGGGGAGGGGACACTCCTGTCTGGAAGGGACAGAGGCCTTCAGATGAGGAGCCAGGAGGCCC
AGGCCTGAGGGAGGAGAAGGGCCTAGTCTGATGGGGAGAAGGGCCCTTGCCTGAAGGCAGAG
CAGTTTCCTGCCTGGGAAGGTCATCCCAGCCCCACCCATCAGTCTGAATTGGACATCACCAG
TGCCCAGGACATTGGAGGTCTGAGGGAAAAGTCTAGAAAGATGATGGGGCTGGTCACACACT
AATTACCAATGGGAAAGCTAAGGTGAGTTCCAAGTTTGGCTTCACCAGAGAAAACTAATTTG
TGTGGCATTCCAGAAAGACCTGCCAAACTCGATGAGTGAACAGGCAGCCCTTCTTCATTCAT
GCATGCATTCAGTTTTTGAATCAGGTGAGACTTTAGATCTCACGTGAAATAAGTCTTAAGTG
AAACAAAGAGAAATTTATCTTATAATAAGAGAAAATTGGCCGGGCATGGTGGCTCACACCGG
CAATCGCAGCACTTTGGGAGGCCGAGGTGGATGGATCACTTGAGGTCAGGAGTTCAAGACTA
GTCTGGCCAACATGGTGAAACCCCGTCTCTACTAAAAATGCAAAAATAGCCTGGCGAGCTGG
CAGGCGCCTGTAATCCCAGCTACTCAGGAGGCTGAGGTGGGAGAATCGCTTGAACCTGGTAG
GTTTAGGTTGCAGTGAGCTGAGATTGTGCCACTGCACTCCAGCCTGGGCAACAGAGCAAGAC
TCCGTCTCAAAAACAAAACAAAACAAAACAAAAAAAGAAAGGAAAAAGAAAATTGGCCGGGC
ACGGTGGCTCACACCTGTAATGCCCACACTTTGCGAGGCCGAGAAGGGTGGATTGCTTGAGT
CCAGAAATTTGAGACCAGCCTGGGCAACATGGCAGAACCCCATATCTACAAAAATAAAATAA
AATAATTAGCCGGGTGTGGGGGTGCACACCTGTAGTCCCAGCTACTCAGGAGGCTGAGGTGG
GAGGATCGTTTGAACCCAGGAGATGGAGGCGTCAATGAGCCAAAATCACACCACCGCACTCC
AGCCTGGGCAACAGAGCAAGACCCTGTCTCAAAAAAGAAAAAAAAAAAAAGAGAGAGAAAAG
AAAAGAAAATGAAAAGAAAAAATTCAAGCAAATTTAGAATGATCTCCTTCACAAAGAGGCGA
TAGTGTGAGGGTCACTGGGAAAATTAGACAAAAAGTCTGGTCTACTGAAATATGGTTTACAT
CCACATGGATGGTGGGCTGTACTTTTCTCCAGAATTGTGTAATTCCTTTGGCCCATTGGGGG
TCAGAAAAAGAATGGCTAAATGTTACTATCCCAAGACACTTGGATTGATTATTCCAGAGTGT
GAGTAAATTCAGGTATCTCTTTTAGGAATTCCATCTACTTTGGGCTGGGCTTAGTGGCTCAC
ACCTGTGATCCCAGCACTTTGGGAGGCTGAGGCAGCGGGATCGCTTGAGCTCTGGAGTTTGA
GAGCAGTCTGGGCAGCGTAGTGAGACTTTGTACGGACGAAAACTTTTTTTTTTTTTTTTGAG
ATGGAATCTTGCTCTGTCACCCAGGCTGAAGTACAGTGGCACAACCTCGGCTCACCGCAACC
TCCACCTCATGGGTTCAAGCGATTCTCCTGCCTCAGCCTCCTGAGTAGCTGAGATTATTATT
ATTTGTTTTTTTGAGATGGAGTCTCGCTCTGTCACACAGGCTGCAGTACAGTGGTGCAATCT
TGGCTCACTACAACCTCCGCCTCCCGTGTTCAAGTGATTCTCCTGCCTCAGCCTCCCAAGTA
GCTGGGATTACAGGCACCTGCCACCACACCCAGCTAATTTTTGTATTTTTAGTAGAAAAGAG
GTTTCACCGTGTTGGCCAGGCTGGTGTCGAACTCCCAACCTTCGGGGATCTGCCCGCCTCCG
CCTCCCAAAGTATTGGGATTACAGGCATGAGCCACTGTGCCTGGCTGAAAAATATTAAAATA
TATATATTTTTTAAGGGATTCCAGCTACTTTGTTGTTATGGAGATCCAGAACCCAATTAAAG
CCTGTCTATCATGTTTGAGGAAAGTGCAGTTTGAGTCAAAGCCTAGTCCAGTCCAATTTCAT
TTACTTGCTGGTAGTGTCAAGCTGTTTTTGTTTATTTATATATTTATTTAGAGGCAGGATCT
TGCTCTTTCGCCCAGGCTGGAGTGCAGTGGTGCGATCACAGCTCACTGCAGCGTCAACCTCT
TGGGCTCAAGGAGTCCTTCTGTCTCATCCTCAGCCTTCTGAGTAGCTAGGACTACAGGTGCA
TGCCAGCATGCCCAGCTAATTTTTAAATTATTATTTGTAGAGAGAGGGTCTCAGTGTGTTGC
CCAGGCTGGTCTCAAACTCCTGGGCTCAAGCCATCCTCCCACCTTGGCCTCTCAGAGCGCTG
GGATGATAGCACCACATCCAGCCTATCGAGATTTTTTTTGTGTTTTTTTCTTTGTTTTTTGT
TTGTTTGTTTGTTTGTTTGAGAGGGAGTCTCGCTCTGTCGCCAGGCTGGAGTGCAGTTGCGC
AGTCTCGGCTCACTGTAACCTCCGCCTCCTGGATTCAAGAGATTCTCATCCCTCAGCCTCCC
GAGTAGCTGGGATTACAGGCGCATGCCATCACACCCAGCTAATTTTTGTATTAGGTGGTTTT
TAAAGGCCACCGCTTCTTCAGTGTTCTGCACCAGGTCTGGGAATGTTCTCAGCTCACCTAGT
CATGTTCAGAATGGACAAATCCCTCAGAGGAAGCAGACACGGTTTCTCGGGACGGTGATCCT
TTAGAGCCACATGCACATGCTTGCTTTCTTTTATTATTATCTTTTTTTGAGATGGAGTCTCA
CTCCGTCACCGAGGCTGGAGTGCAGTGGCATAATCTTGGCTCACTACAACCTCTGCCTCCCG
GGTTCAAGCGATTCTCCTGCCTCAGCCTCCCGAGTATCTGGGACTACAGGTGCCCGCTGCCA
AGCCTGGCTAATTTTCATATTTTTAGTAGAGGCGCGGTTTTGCCACATTGGCCAGGCTGTCT
CGAACTCCTGACCTCAAGTGATCCACCCGCCTCGGCCTCCCAAAGTGCTGGAATTACAGATG
TGAGCCACTGTGCCTGGCCAAATGCTTTCGTTTCTTTAAAAATCAAAGGGAAAGGAATGACT
ATAATCCAGTCTGCATTGTATATGTCCTTATACCAGTACATTTGTGGGATATAATTTTTAGT
TCTTTTTATGGAGAAGAAGTTCCCAAGGCAGATGTGTCTGGGGCTCGTGAAAATTCATCCTG
AAGTCCTCCATGTCCGGGATGTATTTCACTGCTAGGAATCCCTCCTGGGCAGAGGTAGGATC
TAAAGGTGTGACCGCTGAGGAAGTAGGTCGGCTCTCTTTTTGTTTGTTTTTTGTTTTTGTTT
TCAGATGGAGTCTGTCTCTGTCGCCTGGGCTGGAGTGTAGTCGTGTGATCTCAGCTCACTGC
AACCTCCACCTCCTGGGTTCAAGTGATTCTGCTGCCTCAGCCTCCACAGTAGCTGGGATCAC
AGGCACGCGCCACCACACCCAGCTAATTTTTGTGTTTTTAGTAGAGATGGGGTTTCACCATG
TTGTCCAGGCTGGTCTCAAAGTCCTGACCTCAAGCGATCCACCCACCTCAGCCTCCCAAAGT
GCTGGGATTACAGGGGTGAGCCACCGTGCCCAGCCTTAATTTTTGTATTTTTAGTAGAGATG
GGTTTCACCATGTTAGCTAGGCTGGTCTCCAACTCCTGGCCTCAAGTGATCCACCTGCCTTG
GCCTCCCTAAGTGCTGGGATTTCAGGCATGAGCCATGGCAACTGGCCTGCTCTGTTCTAAAT
GCAGATCTAAACCCCCTGCAGGTAACCTGGATGAGGACATCATTGCAGAAGAGAACATCGTT
TCCCGAAGTGAGTTCCCAGAGAGCTGGCTGTGGAACGTTGAGGACTTGAAAGAGCCACCGAA
AAATGGGTAAGGCCGGGGTACCCCCGGTACAACCCACCCCAGAGTCAGACCGTTTAATTTGC
ATGCACCTGCTATCTCTGGTCTTCTCTGGAATCACAGTGCAACCCCACAGCCCAACCTAGAA
AAATCAGGAATTGGGTGACCTACATGGAGGCACCCCCAGACCCTTCCAGCCTGTCCCTTGGG
GTCCCTCTGCACCAGTTCTTCCCCTCTACCACCCTGCTAGATGACATCTCCTAATACCCCAA
CCTCTTCTCCATCCAGAATCTCTACGAAGCTCATGAATATATTTTTGAAAGACTCCATCACC
ACGTGGGAGATTCTGGCTGTGAGCATGTCGGACAAGAAAGGTGAGAGAGGATGCTGGCTGGT
CCCCGGGAGGCAGGGACCCCAGGGTGTCTGAGTGTCATCTCATTTTATCCAAACTCAATCAA
CCCTATGTTTCTTGGCACTTTATTCTCTGCCCTGGTTACCACAGAGGTGTTGTTACCAGGAA
CTGTGGGAATCCTTAGTTCCTGTCTAACTTGGAAGAAAGAATTCAGCCAAGAGTCACATAGC
AAGGGTTAAGTAGCAGAGTTTATTGAAGGAAGAAACAGCTCTGGGCTGGTCCCCCTGGAAAA
ATAGTAGTAGCAATGCTTATTTAAAGAGACAGGGCCAGCCTCGATGGCTCACACCTATAATC
CCAGCACTTTGGGAGGCTGAGGCAGGGGAATCACTTCAGGTCAGGAGTTCAAGACCAGCCTG
GTCAACGTGGTGAAACCCCGTCTCTACTGAAAGTACAAAACAATTAGCCAGGCAGGGGGTGG
CGGGCGCCTATAATCCCAGCTACTCGGGAGGCTGAGGCAGGAGATTTGGTTGAACCCGGGAG
GTGGAGGTTGCGGTGAGCTGAGATTGTGCCACTGCACTCCAGCCTGGGCAACAAGAGCAAAA
CTCCTTCTCTAAATAAATAAAAAGTGACCGTATGCTCTGAAAGACGACACAGACATGGCTGC
TCAACAGAACGAGCCAGCAGCAGATACTGCTGGTAGACTCTTTTTATGAGACTCTTACATGA
TTTTTCGTGAAGGGGCGTGAGTGGGTGTCACTTGTAAGCATGTTTTGGGAGGTCTCTTTGGG
CGAGCAGGCTCTGTGGCTGTAGGTACTAGCATGCACGTGGCATGTCTCATTAGCATCGAAAA
TCTCCACCCAGAGGTGTGTTTTTTACTATGATAATGAGCAAAACACAACTCTAGGGTGTTTT
CGGAGCAGTGCACATGCTCATCATCGGGGAAAATCCCTAGCAAAGTTATTTCCAGCTAGGAC
CTGATAAGTCCCCTTCAGGGCCAGAGGACCCCAACCACAAGGCCATGTGTAGCTAAAGTAGC
CATCGTCCTTTTCGCTGACTGCCAGTGAGCAGCGCTGTCAGTAGGCAGCCTGTCTGGGACTT
CTTTTCCCAGAAAGCTCCCCTGCCTGCTCATTTCCGCCTATCTGCCTACTCTAACAGTGTCA
AAAGCTAGACAGGGTGGGGGTACAGTCTCTAAAATTGATGCTTTTCTTTCTTTCTTTTGTTT
TTGAGAAGGAGTCTCACTCGGTCATCCAGCCATAATTTATATGGTTTATTATAATTTATAAT
AAATTTAATTATAATATTTATTTATATATTTATTAATTGTAATGTTTATAATTATAATATAT
AATTATATATTACATAATATATTTCATATCTACATATCACATATTACATATGCAATATATTA
TATACCACATATTACATATATAACATACCACATATTACATATATAATATATCATATATTATA
TATTACATATATAATATATCATATATTATATATTACATATATAATATATCATATATTATATA
TTACATATATAATATATCATATATTATATATTACATATATAATATATCATATATTACATATA
TTATATATTACATATATAATATATCATATTACATATATTATATATTACATATATAATATATC
ATATTACATATATTATATATTACATATATAACATATATATTACATATATCATATTACATATA
TCATATATTACATATATAATATATCATATTACATATATATCATATATTACATATATAATATA
TCATATTACATATATATCATATATTACATATTACATGTAATATGTTATATTACATATAATAT
ATATTGCATATCACATATATAATATGTTATATGTTGCATATTACATATATAATATATTATAT
ATTGTATATTACATATATAATATATATGTAATATATACATATTACACATGTAATATATTATG
TAAACATATAATATGTATTATAATTTATAAGAAATTTAATTATAATATAATTTAATGAATTA
TAATAAACCATAATTCATTATAATTTAATACATTATAATAAACCATAATTTATTATAATTTA
ATTTTGTTGTAATGTATAATTATAATTTACTACTAATATGTCATTTGTTATTGTTGACATGT
TAACATATATAATGTATATTTTATTAGATATATAATATAAATGATGTATCATTTATTATTGA
TTACATATCTATAATTATACCATATCATAACTTATTACAAAACATTCTATTTAATTTAAATA
TACCCAAAATAGTATCATTTCAACATTTTGTAAAAAGTTGCAAAACCACAACCCACTAATAA
TGTGACTATAACCTTTTAATATTTGATAATAATCTACTAGTATATCAAAATTACTGATGATA
TATTTTACTTCTGTTTGCACTAAGTCTTCAAAATCCAGCATGTGTTTTACAATTCAGTGCAT
CTCATTTAGGATACTAGATTTTCTTTCTTTTTTTTTTTTGATACAGGAGCTTGCTCTGTCAC
CTAGGATGGAGTGCAGTGGTGTAAACAGGATGCTAAGTTTTCTTTTTTTAGTAGAGACAGGG
TGTCACCATGTTGGCCAGGCTGGTCTCAAACTCCTGGCCTCAAGCAATCTGCCTTCCTCAGC
CTCCCAGAGTGCTGGAATTACAGGCGTGAGCCACCGCGCCCAGCGCAGGATGCTAGGTTTTC
ACTGGAAATACTTTGATCTGTATTTTAGGTTTCATAAAATTTACAGTTGAAAAGGTAGATTC
TCAGGCCGGGTGCAAAGGCTCAAGCCTGTAATCCCATTACTTTCAGAGGCTGAGGCCGGCAA
ATCATTTGAGGTCGGAGTTTGAGACCAGCCTGGGCAACATGGCAAAGCCCCGTCTCTACAAA
AAAAAAAAAGAAAAGAAAAGAAAAGAGAAAGAAAAGGTAGATCCTCATACTCAAGTAGTTGC
AAAAATACTTAAACGTTTTCCACTCAATCATCATTTTTAAAAAATTAAGATTTAATTCACTT
ACTATATGTCACCCTTTTAAAATGTACAACTCAGGTCGGGCACGGTGGCTCACACCTGTAAT
CCCAGCACTTTGGGAGGCCCAGGCAGGCAGATCACCTGAGGTCAGGAGGTGGAGAACAGCCT
GGCCAACATGGTGAAACCCTGTCTCTACTAAAAATACAAAAAATTAGCAGGACATGCGGGTG
GGTGCCTGTAATCCCAGCTACTCAGGAGGCTGAGGCAGGAGAATTGCTTGAACCCAGGATAT
AGAGGTTGTAGTGAGCCAAGATCACGCCACTGCACTCCAGCCTGGGTGACAGAGCGAGACCC
CATCTCAAAAAATAAATAAATAAAAAATAATAAAATATATAATTCAGTGGTGTTTCATATAT
TTAAAATGAGCATCAGTTGTTTGTTTTGTTTCATTGGGTTTGGTTTTACAGACAGGATCTCA
CTCTGTTGCCCAGGCTGGAGCACAGTGGTGCGATCATAGCTCACTGCAGCCTTGAACTCCTG
GGCTCAAGCAATCCTCCTGCCTCAGCCTCCCAAAGTGCTGTGATTACAGGCATGAGCCACCG
CACCTAGCTAGATCATCAGGTTTAAAGTTTAAGTCTGAATTAAATTAAATACATTTAAATAC
AAGTACATCAAATAAAAGTACAAATCCAGTTTCTCACTCAGGCAAACCCCATTTCAAGTGCT
CAGCGCTCCCCCACAGCTTGGGGCTACCATATCAGACAAGCAGATATATTTTGGAGATTTCT
CTTCCTCCCTACACGTAGATCTCTGAGTCAAACTACAAACAGAATGTAAATCATTAAATAGT
GGTAACTCCGGCCAGGCGCAGTGGCTCACGCCTGTAATCTCAGCACTTGGGAGGCTGAGGCG
GGTGGATCGTGAGGTCAAGAGATCGAGACCATCCTGGCCAACATGGTGAAACCCCATCTCTA
CTAAATATACAAAAATTAGCTGGACATGGTGGTGCGTGCCTGCAGTCCCAGCTACTCGAGAG
GCTGAGGCAGGAGAATTGCTTGAACCCAGGAGGCGGAGGTTGCGTTGAGCCGAGATGGCGCC
ACTGCACTCCAGCCTGGCGACAGAGTCTTGCTCTGTCTCAAATAATTAATAATAATAATAAT
AATAATAATAATAATAATAATAAATAATGGTAACTCCCAGCCACCACCATCATCATCTGTCA
TTTGTCGCCATTGACAGCGTTTAGTTCACAGGCTTCAGCAAAGACAGGCTGAGTTAGGGAGA
GCTCCTGCGGAGTGGACTAAGAGCTGAGACCCAGGAGCCTGGCCTTGTCCACTCCCCGACCT
TGACACTCCGTGTTCTGTCTCTGCCCGAGCAGGGATCTGTGTGGCAGACCCCTTCGAGGTCA
CAGTAATGCAGGACTTCTTCATCGACCTGCGGCTACCCTACTCTGTTGTTCGAAACGAGCAG
GTGGAAATCCGAGCCGTTCTCTACAATTACCGGCAGAACCAAGAGCTCAAGGTGGGTCCCGG
GGTGGCAGAGGCTTCTTGGAGGCTGCCAGGGGGTAGGTAGCCTGTTGCACACACACTTGCCC
GGATCCTTTCTCTCCCTGGCAGGTGAGGGTGGAACTACTCCACAATCCAGCCTTCTGCAGCC
TGGCCACCACCAAGAGGCGTCACCAGCAGACCGTAACCATCCCCCCCAAGTCCTCGTTGTCC
GTTCCATATGTCATCGTGCCGCTAAAGACCGGCCTGCAGGAAGTGGAAGTCAAGGCTGCTGT
CTACCATCATTTCATCAGTGACGGTGTCAGGAAGTCCCTGAAGGTCGTGGTGAGTGCTTGGG
GCACCCACAAACCCTTGTCCTTCAGAGAGGGCTCCTGGTCTTCGTACTATTGACTCAGGTTG
GAGATCCAGGCTCTGAGACACTAAGAATCATAGTGTCCAGCTTAGGAAATTTGGAAGTCCCA
GAATTTCAGAAGCAGAGCCAGGATTGGGGTAAAGTGAGTGAGATGACCCCAGGCTTAGAATT
TTAGGTGGTGCCAAAAACCTCGTCGACCATCACCAATCAATAATTTTTTTATACTCGATTTG
AAATTTTTTATTTATTTATTTATTTGTTTGTTTATTTTTTTGAGACAGAGTCTCACTCTGTT
CCCCAGGCTGGAGTGCAGTGGCGCGATCTCAGCTCACTGCAATATCCGCCTCCCGGGTTCAC
GCCATCCTCCTGCCTCAGCCTCCCGAGTAGCTGGGACTACAGGCGCCAGCCACCACGCCCGG
CTAATTTTTTTGTATTTTTAGTAGAGACAGGGTTTCACTGTGTTAGCCAGGATGGTCTCGAT
CTTCTGACCTCGTGATCCACCCACCTCGGCCTCCCAAAGTGCTAGGATCACAGGCACGAGCC
ACCGCGCCCGGCAATGCTAGGGTGATCCTAAGGACAGTGCCCTGCTGACCATCTGTGTGTCT
GTCTGTTCTTTTATTCATCCAACGACTCCCCCCACCTCTAACACTGCGTAGCCGGAAGGAAT
CAGAATGAACAAAACTGTGGCTGTTCGCACCCTGGATCCAGAACGCCTGGGCCGTGGTGAGT
CGGCTGCAGGGGGAGGGGCTGAGGGGCTGGCAGGGTAAGGGGGGTAAATGACCTGGGTTTAG
TGAGGTAGGATAGGGCGGGAGGGAGCTAGAGCCATCGGTATCTCTCACTCACCCTGCAGAAG
GAGTGCAGAAAGAGGACATCCCACCTGCAGACCTCAGTGACCAAGTCCCGGACACCGAGTCT
GAGACCAGAATTCTCCTGCAAGGTGAGACACCCTTGACCCCGACCCCATGGGTCCCAGGAGG
GCATGGATGGAGCCAAATTCCATCTCATTCTGGAGGTGTTTAACCCGCACCTTTCTCTTCCC
CTTCAGCTAGAACAGCCCATCTGTGATCTGTTTTCCCTCTTTTACATTTTTTTTTTTTTTTT
TTTTTGAGACAGAGTCTGGCTCTGTCACCCAGGCTGGAGTGCAGTGGCGCGACCTCAGCTCG
CTGCAAGCTCCGCCTCCCGGGTTCACGCCATTCTCCTGCCTCAGCCTCCCGAGTAGCTGGGA
CTACAGCCACCCGCCACCACGCCCGGCTAATTTTTTTGTATTTTTAGTAGAGACAGGGTTTC
ACCGTGTTAGCCAGGATGGTCTCGATCTCCTGACCTCGTGATCCACCCGCCTCAGCCTCCCA
AAGTGCTGGGATTACAGGCATGAGCCATTATGCCCGGCCTAAAAATTTTTTTAACCATACAG
ATATTATTTGCTATGATCGGTTTTATAGAAGCCTCCAGATAGCATTTAGTTCAGCAAAGAGC
TTTCGCTGATACATCAGTTTATTTTAATTTTTCTAGACCTTCTGTGCTTCTTAGATGGGAAA
CCAGCTTAAATGAGACTCAATAGCCTGTAATCCCAGCACTTTGGGAGGCCGAGGCAGGCAGA
CCACCTGAGGTAGGAGTTTGAGACCAGCCTGGCCAACATGGTGAAACCCTGTCTCTACTAAA
AATACAAAAGTTAGCTGGGCGTGGTGGCACATGCCTGTAATCCCAGCCACTCGGGAGGCTGA
AGCAGGATAATCGATTGAACGTGGGAGGCGTAGGTTGCAGTAAGCCGAGATCAGGCCACTGC
ACTCCAGCCTGGGCGGCAGAGCAAGACTTTGTCTCAAACAAAAACAAACAAACAAACAAACA
AAAAGACAAGCAACATAGTACAAGAGCAGAAATTCTGGAGGTCATTTCTTGCCCCAGGAGGG
AAGACTGGAGAAAGAAAGGGACTTGCAACCTGTAAGCTATAAGGCTTTGGGGCAAGAGCCTT
GGTTTTTTCACCTTTGGTAGGGGTAGAATAATAGTATCTACCTCCAAGGGTTGGTGTGATGA
TTTTTTTTTTTTTTTTGAGGCGGAGTCTCACTCTGTCGCCAGGCTAGAGTGCAGTGGCGTGA
TCTCGGCTCACTGCAACCCCAGCCTCCCGGGTTCAAGTGATTCTTGTGCCTCAGCCTCCCAA
GTAGCTGGGACTACAGGCGCCCGCCACCATGCCCACTAATTTTTGTATTTTTAGTAGAGACG
GTGTTTCACCATATTGGTCAGGCTGGTCTTGAACTCCTGACCTCAGGTGATCCACCCACCCC
AGCCTCCCAAAGTGCTGAGATTACAGGCTTCAGCCACGGCGCCCAGCCTCGTTGACTATTAA
GTGAGACACTCTATGGTATTCTCTTAGAACAGTCTGGAAAGTAACATTAAGCGTGATATAAG
TATTCCTGAATATTGTTACTGGAATTATTTTACTGCTGGTGAAATGAGACCCAAGGACCAGG
GTGCCCCTGTGAAGCACCTCCCACTCCTAACAGTGCAGACCCCCGAACAGCCACTCAGCCAT
GCAGCCTCCCCTCCCCGCAGTCACATCCTCCCCAGTCCTCGCCTGTCCCTAACCCCTTGGCC
CTGGCTGGTTGGGAGGCTGGAACCCTTTTCACGCCACCCCAAGGTGGGTCACCCACCTGGCT
TGAGCAACGTCCTCTTCCCACCTGCTGCAGGGACCCCAGTGGCCCAGATGACAGAGGATGCC
GTCGACGCGGAACGGCTGAAGCACCTCATTGTGACCCCCTCGGGCTGCGGGGAACAGAACAT
GATCGGCATGACGCCCACGGTCATCGCTGTGCATTACCTGGATGAAACGGAGCAGTGGGAGA
AGTTCGGCCTAGAGAAGCGGCAGGGGGCCTTGGAGCTCATCAAGAAGGGTGGGCTCCCTGCC
CCTCTTGGAGACCCCAGGGACCCCTTTCCGAGCGCATCCCTCCCCTAAGATCCCACCTCATC
TCAAGACCACGCCCTCCCCTGAGGCTCCACCTTCTCTCCTAGCCACTCCCCTCATTTGAGGC
CCCACCTCTTCTCAAGGCTACGCCCTCTGAGGCCCTGACTCCTCCCAGGCCAGGCTTTTCAT
GAGACCCCGCCTCTCCTCAAGGCCATGCCCATCCCCTGAGGGCCCCCCACCTCTTCTCAAGG
CCACGCCCTCTGAGGCCCTGACTCCTCCCAGGCCAGGCTCTTCATGAGACCCCGCCTCTCCT
CAAGGCCATGCCCATCCCCTGAGGGCCCCCCACCTCTTCTCAAGGCCACGCCCTCTGAGGCC
CTGACTCCTCCCAGGCCAGGCTCTTCATGAGACCCCGCCTCTCCTCAAGGCCATGCCCATCC
CCTGAGGGCCTCCCACCTCTTCTCAAGGCCACGCCCTCTGAGGCCCTGACTCCTCCCAGGCC
AGAATCTCGAGACCCTGCCTCTTTTCAAGGCCACGCCCATCCCCTGGGTCCCCACATCTTCT
CAAGGCCACACCCTTCTGTGAGGCGCCACCTCCTGTCCCAGCCACTCTCATCTGAGGCCCCA
CGTCCTCTCCAGGCCATGCCTCTTCCCTGAGACTCCACCCCCTCTCTGAGAGCCCTCCCCTC
CCTGAAAGCCCCCCACCCTCAATATCCTTCTCCTCTCTGAATCCCTTGTCCTCTTGAGAACT
TTTCCACCTCCTCGTTCTGATCCCCCACCCTCTTTGAGTCCTTCCCTTTTTAAGGTCCCCTC
CTCCCAGAACCCCTCCGCCACCCTGAGCCCCTGTCCCCTCTCTGCACCCCGCCCCTGCCCTT
TCTGGCGTGCCCCCTCTGCTCAGCCCCGGCTCTTTTGGGGGTTCCTCTCTCTTCTCTGCAGG
GTACACCCAGCAGCTGGCCTTCAGACAACCCAGCTCTGCCTTTGCGGCCTTCGTGAAACGGG
CACCCAGCACCTGGTGAGTCCCAACAGCCAGCTCAGGCCATGCATACTCCCCACCCTCAACC
CCCAGCAGGGCCCGGACCCTGGCCAGGGGTGGTCCCTTAGGCCAGCCTTGCCCAAACAGCCC
TGGACCTGCAGAGTCCAGGCAAGCGCTGGCTGAGTGGCCGGCGGTCATTAAGCATCCTTAAG
CACGGACCGCATACAACAGCTGGGTCCTGGGGCCTGGGAAGGCAAACCAGGCAAACTGGGCC
AGGCCCTGGTCCCTCCCCCACGCTCATTGGCTGGTTGACATGGCAGTCTCTGGATCTCAGAG
CCGATTGGCTCATGCTCTGTGCCCACTCCAGGCTGACCGCCTACGTGGTCAAGGTCTTCTCT
CTGGCTGTCAACCTCATCGCCATCGACTCCCAAGTCCTCTGCGGGGCTGTTAAATGGCTGAT
CCTGGAGAAGCAGAAGCCCGACGGGGTCTTCCAGGAGGATGCGCCCGTGATACACCAAGAAA
TGATTGTAAGAGGCTGGGATTTAGGGCAAAATGGAAGAGAGGGGCTCCTGAGTCTCGCAGGA
TGAACACGAGAGAGAGCCCCACCTCCATGTGCCCACTGCCCAATTCCCTTTGCAAAGATTGG
GCTGGGGGGTGGGGGCAGGCAGATATATGAGCCAGAGGCGTCACTCCAGCATTGCAAAAACC
AGAGACCTGCGAAGCCCAGCGCAAAATGAAGAGACACGGCCCCTCGCTCAGAAATTATTAAG
AATTTCATTAAACCAAGTGCAGGGGTCCTGCCTGGGAATCCCTTTCTCACATTCAATCCATC
AACACCTGCATTCTCCCATGATGTTATAAGAATCACCTCCTTCTCTCCATCCTTATGGCCAG
CCCCTGGTCCAAGCAACACTCTCCCCGCCCCTCCTTATTTGGAGACCTTGTAGAAACCACCT
CCTGGTCATCATCCTGGTGGCCTCCCACTTTTGTTGGCTCTCAGACACTCACCACATAGCAG
TTGGGGTGATTTTTTCAAATCCAGCTGGATCAGTTCTTAGAAAGTCCCGTGGCTCCCCCTGT
GGCACTTAAACACAAAACTCCTTCGAGCACTGGTTCTCGAAGTGTGATCCTCAGACCAGCGG
CAGCAACAGCACCCATGACTTACTAAAAATGTGCATTCTGTGGCTGGGCTCGACGGCCCATG
CCTGTAATCCCAGCGCTTTGGGAGGCCGAGGCAGGAGGATGGCTTGAGCCCAGGAGGTCGAG
GCTGCAGTGAGCCATGATCATGACACTGCACTCCAGGCTGATAACAGAGTGAGACCCTGTCT
CAAAAACAAAACATATTCTGAGACCGGACCCCAGACTCACTGAATCAGAAATTCTAGGGGCA
GGACCCAGGAATCTGAGGGGTGTGAGTGTGTGTGTGTGTGTGTGTGTGTGTGTGTGTGTGTG
TGTGTGTGTTTGAGATGGAGTTTTGCTCTTGTCACCCAGGCTGGAGTGCAATGGCCCGATCT
TGGCTCACTGCAACCTCCACCTCCCAGGTTCAAGCAATTCTCCTACCTCAACCTCCTCAGTA
GCTGGGATTACAGGTGCCCGCTCCACCATGCCCAGCTGATTTTTGTATTTTTAGTAGAGACG
GGGTTTCACCATGTTGGCCAGGCTGGTCTTGAACTCCTGACCTCAGGTGATCCGCCCACCTT
GGCCTCCCAAAGTGCTGGGATTACAGGCATGAGCCACCGCGCCCGGCCTAGGAATCTGAGTT
TTTAAAAGTGCCCGCATTCCTCCAGGTGATGCTAATGTGTGCTTGAGATGGAGAATCACTGC
CTCAGTCTCACCTTTCAGGCTTCCAGACTTCCAGCCTTTCTTTTCTTTCCAGGCTCCATCCA
TTGATAGGAGCCTTGCTCTATTGTTCTACAGGGCCTTTGCACATGCTGTTTCTGCCACCTAG
TATGCTAATCCCTGCCGTCTGTGAGAGTTGACTCCCTCAGGGACACTTTTTCTGACCTCCCC
AACTGGGTCACACTCCCACAGTTCATTATCGCTGCGATGTCCTCTTTCCCTTGCACAGAACT
CATCCACTTATAAGTATATATCTCTTGGCTGGGCGCAGTGGCTCATGCCTGTAATCCCAGCA
CTGTGGGAGGCCGAGGCAGGTGGATCACCTGAGGTCAGGAGTTCGGGACCAGCCTGACCAAC
AGGGGAAACCCCATCTCTACTAAATACAAAAAAATTAGCTTGGTGTGGTGGTGCATGCTTGT
AATCCCAGCTACTTCGGAGGCTGAGGCAGGAGAATTGCTTGAATCCAGGAGGCGGAGGTTGC
AGGGAGTCGAGATTGCGCCATTGCACTCCAGCCTGGGCAACAAGAGCAAAACTGTCCCAAAA
AAAAAAAAAAAAAGTGTATATCTCTTGAGGAGCTGGATGGACCATGTCCATCTTCCCTACTA
GACAAAAGCTCTGTGAGGGCTAGAGCCTGTGTCTGGTTTTACAATGGATCAGACCGTTGTAC
CCATTGTACATTGCACATTGTACATTGACATTTGCAGAAGGAACAAATTGTTGCATGAATTA
ATACTAAGAAGTTTGACCTTCCTAGGGTAGCGGGGTAACACCTAGAAGAGACTCAGCCCTGC
CCAGACCCCCTGATTCTGAATCTGCAAGGGGGGATGACTGCCATGTGTGGACACACCGGTGA
CCCCATCCTTGCTTTCTGCTCTCTATCTCAGGGTGGATTACGGAACAACAACGAGAAAGACA
TGGCCCTCACGGCCTTTGTTCTCATCTCGCTGCAGGAGGCTAAAGATATTTGCGAGGAGCAG
GTCAACGTAAGTGCCCTCCATCTTCCCACCCTACCCTACCTTACCCGATGCAGAGCACAGCC
ACCTTGGAGAGTGAGAGGTTGCCTTCAGGGAATTTGCAGCTCTCCCAGTGCAATAACAGACA
TCACTGCAGTCATGTTAATAGCTAACATCTTTTGAGCACTTAACTCATCTAATACAGACCCG
CCCTCTAATAGTTTCACATGTTAAGTCTCATAATCCTTTTAGCAGCCTGAAAGGTAAGTCAC
TCTTATTATCCCCAGTTTGCAGATGAGAAAACTGAGGCACAAAGAGATCAAAGGTGGGGATT
CTTTCTGTCTGCCTTACAATTTTCAGAGGGTTTTCAGCCCATTTCCAAAAGTGCTTTCTACA
TCAGTGCTACATGATCAGTACAGTTGCGTACTTGCTACTTCCTTAAAGAAAACTTGGGATAC
AGAGCTAAGACTATTTCCTTAGTCCAGAGGATCTTTCAGGTGATTTTCAAAGGGATCCGTGA
CTCCAAACAGGAAACGGTGAACACTGTTGGCTCATCACTGTCTCTTTTTCCTCTGGTTTTGA
TTCTGAAGCAGGGAAGCTTGGAAAGATGGGCCGCTGAGAGTCTGGAATGCCTTTGTCTGCTT
TATTGTGGTTGTTTGTTTGTTTGTTTATTTTTTGTGATGGAGTCTCACTCTGTCGCCCAGGC
TGCAATGCAGTGGCATGATCTCAGCTCACTGCACCCTTTGCCTCCCAGGTTCAAGGGACTTT
ACTGTTTCAGCCTCCAGAGCATCTGGGATTACAGGCACCCGCCACCATACCCGGCTAATTTT
TGTCTTTTTAGTAGACATGAGGTTTCACCATATTGGCCAGGCTGGTCTCGAACTCCTGACCT
CAGGTGATCTGCCTGGCGTGGCCTCCCAAAGTGCTGGGATTACAGGCATGAGCCACTGCACC
CAGCCTAATTGTTGTATTTTTAGTAGAGATGGGGTTTCACCATGTTGGCCAGGCTGGTTTCG
AACTCCTGACCTCAAGTGATCCACCCACCTTAGCCTCCCAAAGTGCTCGGATTACAGGCGTG
AGTCACTGCACCTAGCTGATCGTGGGGTTTTGAGTGGGTTGTTTAACGTTTAGCTTTCCAAG
TGGGAAGCCCAGGATTCCACCCTCAGCTAGTGGCTTCTCCCCCCTTAGGAAAAGAGATGGAG
GGGAGGGGCCAGTGAAGAGAAAAACAAACACAGGGCTGTTGCCTCTAACACCCAAGAGGGAC
CAAGGCAGAGAGAGAGAGAGAGAGAGAGAGAGAGGGAGGGAGGGAGGGAGGGAGGGAGGGAG
GGAGGTAGGTAGAGAGAGAGAGAGAGAGAGAGAGGAGAGGTGGGGTCAGACAAATCTGACTT
CAAATCCTGACTCATGGGCACTTCCACCCTTGAGCCTCACTCAGGATGTGCATCTGTAAATT
GGGGATAATAAATAACGATCTCTGTATTTTTAGGCCTCTGAGTTGTCCCAGATATAACACAC
ATGTGACCCAGATTATACAAAAATTGATGGGGAATTTATGTGCAGGCACCAAGGCATCAAAT
AGAGATGAAGGTGGCCTCAGGGACTCTGCCAGGATGCTTTGCTCCTCTCTCCCGTGATCTTC
ATTCCGTTCTTGGCCAATAATTCAGTTCAGGCAGAATATGGCTGCCTTCCTTAGAGAAAATA
TCAGATCAAGGTTAGGGCCGCCATATTCCCAGGAAAGGACTCTGATTGGCTCAGCCTGGGTC
AGATGACTATATCTGGACCAATCAGCTAAGGACAGGAAGTAGGTCTCAGGGGGCAGACATGG
CTGTTTCCACTGTGGCCACGTGAATGGAAGGGAGAAGAAGTTCTTACAAAAGGAGTGGATGT
CAGAGAGGCAAATGGGCAGGAATAAAAGAGATTTGTTTCTGCTACAACATAGCAACATTGTA
GCAGAGTATAGCACAGGCTGTGAAACCAGACTCCTGGGGTCAAGAGTGTGCTGTAATCCCAA
CTACTCAAGATGCTGAGGCAGGAGAATCACTTGAACCAGGGAGGTGGAGGTTGCAGTGAGCC
GAGATTGCGCCACTGCACTCCAGCCTGGGCAACACAGCAAGACTCCTTTTCAAAAAAAAAAA
AAGTGTGCTATAACTAGCTTGCTGGAGCCCAGTGTTAAATTTCCAGGAATTTTTCAAGCTGG
TCATTAAATACAATTATTATTAAAAACTAAATATTAGGCCAGGCACAGTGAGCCTGTAATCC
CGGCACTTTGGGAAGCCAAGGCCGGCAGATCACCTGAGGTCAGGAGTTCAAAACCACCCTGG
CCAACATGGCAAAACCCCGTCTCTACTAAAAATACAAAAATTAGCCGGGCATGGTGGAGGGG
GGCGCCTGTAATCCCAGCTACGCAGGAGGCTAAGGCACAAGAATCGCTTGAACCCGGGAGGC
GGAGGTTGCAGTGAGCCGAGATTGCGCCATGCACTCCAGCCTGGGCCAGAGCGAGACTCCGT
CTCAAAAAAAAGGCCAGGCGCGGTGGCTCACGCCTGTAATCCCAGCACTTTGGGAGGCCGAG
GTGGGCGGATCACGAGGTCAGGAGATCGAGACCACGGTGAAACCCCGTCTCTACTAAAAATA
CAAAAAATTAGCCGGGCGCGGTGGCGGACGCCTGTAGTCCCAGCTACTGGGAAGGCTGAGGC
AGGAGAATCACTTGAACCCGAGAGGCGGAGCTTGCAGTGAGCCGAGATCGCGCCACTGCACT
CCAGCGTGGGCGACAGAGCAAGACTCCGTCTCAAAAAAAAAAAAAAGCAACAACAAAAAACC
CAACCAACCAACCAAACAAACAAAGTTATAAAAGTTACAGTTAAATAAATTATATTAAACAC
AAAGGTTAGAAACACTCAAACTCATCGCTTCCTAAACGCCTTACTCCCATAATCTATACTCT
TGGGGTTACTTATGTCTGTTGGATCTGTATAGTGAAAATACTATATAATACTGTGGTACTGC
AAAGCTCTTCCCAACTCTACATTCAACGACACCATATTGGTAGGTTGAAATCAGTGATGGAA
GTATTTACATCATGGAAATGAGAAAACAGTACAAATCATGTCTTCCCCCATCCCCAGAAGGC
TGTGTTTGGATCCTAACTCTGCCACTTATTTCCTAGGTGGTCTTTGCAAAATTACTGCATCT
CTCAGGGCTCAGTATGCTCATCAGGTTTTATGAGATTAAATGTGTGGGTATCTGAATGACAC
AAAGTAAGTGTGAGCTATGATGATGAAGAAGATAAAGATGATGATGACGATGATGATGATGA
CTGGATGAGGTGTTCACAGTGGTATACTGAATCTGGCGCATACTAGTTTATGAGTAACAATT
TGGAGAATGTCTCCCCAGGACTTTGTTCAGTGATGTCGCATTGACACCGTGAAATTGGCCCC
TGGTGGGAGTATTTACACCACAGAAATTGTAAATCATTATAAACCAAGGATCCCTCAACCCT
CCCACTGGAGAGCTGGCTGTTAAACTTTTACCAGCACACCACGGGGTACGTGGATTTCTCCA
GATACATAATAGATATGCAGCAACAAGGCAGCTCATGGTGGCTAAAATATCTGGGAAATTCT
CAAAAATGGACAAATCTAAGACAGGTGTGTCCCAAGGACAGAAATCCCTGATGCTCAGGAAG
TGCTGCTCGAATGATCCTTACTAACGTGACAGCAATGCCCACATGACCGGAGAATCTGATCC
TCTTTCTCATAGAGCCTGCCAGGCAGCATCACTAAAGCAGGAGACTTCCTTGAAGCCAACTA
CATGAACCTACAGAGATCCTACACTGTGGCCATTGCTGGCTATGCTCTGGCCCAGATGGGCA
GGCTGAAGGGGCCTCTTCTTAACAAATTTCTGACCACAGCCAAAGGTGAGGGTTGGCCTGGA
GGGGTGAAGGGAGATGCATGGCTGAAGTTCAGGGCGGGAGATACTGAGCTGGGATGCATGGC
TTTTAGCTGAGCTGGGACAGATGACCCTAAGCCAAGCTGAGATGGATAGTCCTAAGGTATCA
AGCTGGGATGCATAACCCTGAGCTGAGCTGGGATGCACGGCTCTAAGTTTTCGCAGGTCCTC
ATTGTAAACCACACGAGAAAGTTTGTTGCGTCATTTATTCAACAAATGCGTATTAAGCATTC
ATTTCAAAGGGAGAAGTGAGAGTTGATGAAACAAGAGAGGTAAGGCAGGAGCCAAGTAATTG
AGAGCCTCGAATGTCAGCCAGGACACCCAAACACCAGGAAGTCTAGCATGCATCTCTTTCTG
AGCTTTCTCTGAGCCATCCCCAGGCTGGACAGAGCAGTGAGCACTGGGGATGGGGTATCTTC
TTTGCAGATAAGAACCGCTGGGAGGACCCTGGTAAGCAGCTCTACAACGTGGAGGCCACATC
CTATGCCCTCTTGGCCCTACTGCAGCTAAAAGACTTTGACTTTGTGCCTCCCGTCGTGCGTT
GGCTCAATGAACAGAGATACTACGGTGGTGGCTATGGCTCTACCCAGGCAAGTGGGCCCACA
GCCCCTAGGCACATGCATCCCTGTCTCCTGCGGCTTCCCACTGGCCTCCTAGAGAAGACACT
GAGGCCCAGCGAGGCAGTTCTTCATTCCCACGAGCCAGTGTGATTGCAGTGGAGTTGAGAAT
CAGTTTTTATTACTTGCAAACCCATCTATAGGTTCTAGAATACAATCTGGGTACTCCAAGCT
GTGTGTTGAGCCTTCTTCTTGCCCCAGGTGTCTAGATCATGTTCTCAGGGCCCAGGTTCAGG
TCTAAGCCTCTCTCTCCACCTGGTGGGCTCTAGACCAGGTTCCCAGTTCTATCTCACAATCT
TACCCTGTCTTGCTGGTGGGTTCTAGACCATGTTCCCAGTTCTACCAGGCTCCCAATGTCAC
ATTGCCTCACTGGCGGGCTCTATAGTATGTTCCCAGTTACCCTGGGGCATTACGCAAACCCT
CTTCTAGGCCATGGTTTCAGTAACTTCAGGCTTCAGCAACTTCAGGCTCCAGTTGGCCTCCT
TTCTTTCTGGTGGTCTGTCACTCACGTTCTCAGTGTTACAGTGTCACTCTTGGGTTGTAGAT
TATATGCTCAGTATCCTCTGGCTACGGTTTCATTCTGTTCTTCATGAGTGGGTTCTAGACAT
ATTCTCAGTGTCTCCAAGCCCTGGTCTAAGACTCTCTCCTCTTGATGGGTCTAGACTGCATC
CTCAGGGTCGCTAGACATTCAGTCTTACATTTGGACTTTCTGATGGATTCTAGACATGTTCT
CAGCATCTCCAAGTCCTGGTGTAAGTTTCTGTCTCTCGGAGAGTTCTGAACATGTCCTCAGA
GTCCAGTGACCTCCAGTTATCACCCCTGCACTCTCTAGTAGGTTCTAGGCCACATTTTGATG
TCCCAGCTCTGATTTGAACCTCTTTATCCCCCACTGGATTCTAGCCACTTTCCCAGGCTCCC
AGATCACCATCTTTCTCTCTTGTGGGTTCTAGGCCACCTTCATGGTGTTCCAAGCCTTGGCT
CAATACCAAAAGGACGCCCCTGACCACCAGGAACTGAACCTTGATGTGTCCCTCCAACTGCC
CAGCCGCAGCTCCAAGATCACCCACCGTATCCACTGGGAATCTGCCAGCCTCCTGCGATCAG
AAGAGGTACAGTCACCCAGCCAAGCCCTCCTCACTCTGGCTGTCTCCCCCTACACTAGCCAG
GGTTTACTGGGAAGCAAGAGGGAGGGCCAGGTGACCATCACAGGCAGCAGAAGGCTTAATTC
CCAACATGCTCTCTTCTCTCTTTTCACTCTGCAGACCAAGGAAAATGAGGGTTTCACAGTCA
CAGCTGAAGGAAAAGGCCAAGGCACCTTGTCGGTAAGGAACAGAAACCCACACCTGCCTGGC
CCATGCCCCTCTGCCCCAGAGGGACCATCTCCTCTTGTCCCCAGCAGTCCTAGTCCTGTGGG
CTGACATTGTGTCTCCTCTCCCATCTTACCAGGTGGTGACAATGTACCATGCTAAGGCCAAA
GATCAACTCACCTGTAATAAATTCGACCTCAAGGTCACCATAAAACCAGCACCGGAAACAGG
TAAAAGGAATCAAGGCCTTATCTGTCACCTTCCTCCTACCCCTCTTCTAATGTCTTCCCCGC
TCCTGAATCAACACACAGGTATACCCTCTCCCATCTTTCTCTCTTCTGTGTTTCTAGAAAAG
AGGCCTCAGGATGCCAAGAACACTATGATCCTTGAGATCTGTACCAGGTAAGAAGCTAGGTC
ACCGGGGTTCATCTTGGCCATCCCTCTATCTCTAGCAAGAATTCTTGCAAATAATATCCATG
ATATTCAGTACTTTCCAAGTACACTGTGTATCTGATACTGTTCTAAGTATCCACCATGAGGT
AGACAACACAGACAGTCCTTGCTTTGCATGTTAATGTGAGACCACAGCAATGACCACGTAAG
CTGAGACTGTCAAAGCATCTTAGTAATCAATGGAGGAAAGTACACAATCATTCCATGACCTT
TAAAGTTTTCTTTTTTTCTTTTTAGAGAGATAGGGTCTTGCTCTGTCAGCCAGGCTGGAGTG
CAGTGGCACAATCATAGCTCACTGTAACCTCAAACTCCCTGGCTCAAGCGATCCTCCTGCCT
CAGCCACTCAAGTAGCTGGGACTACAGGCGTGTGCCATGACACCTGGCTGATTTTTATTTTT
TATTCTTTCTAGAGGCAGGGCCTCACTGTGTTGCCCAGGCTGGTCTCGAACTCCTAGCCTTG
AGCATTCCTCTGCCTTGGGCTGCCAAAGTTTTGGGATCACAAGCATGAGCCACTATGCCCAG
CCTAAATGTTTCTATTACAACATTTAAAATTATCATACTGCCAGTTATAAAGATACAGGGAA
ATGGCCGGGTGTGGCGGCTCGCGCCTGTAATCCCAGCACTTTGGGAGGCTGAGGCGGGCAGA
TCACGAGGTCAGGAGATCGAGACCATCCTGGCTAACACGGTGAAACACCGTCTCTACTAAAA
ATACAAAAAAATTAGCCGGGCATGGTGGCGGGTGCCTGTAGTCCCAGCTACTTGGGAGGCTG
AGGCAGAAGAATGGCGTGAACCCAGGAGGCGGAGCTTGCAGTGAGCTGAGATCACGCCACTG
CACTCCAGCCTGGGCGAAAGAGCAAGACTCTGTCTCAAAAAAAAAAAAAAAAAAAAAATAGA
ATAAAACAAAATAAAGATACAGGGAAATGAAATTCATAGTAAGATGAGTATTTGACTACACC
GTAATTTAAAACATTAGAACATTGAGATGCAAGGTGTATTTGTTGTTTTTTTTTTCCTTTGT
ATGACACTTACGGAGAGTACTTTAGTTCAAAAAAATGCTTGCCTTCTTCTCTTTGTATAATT
TACAACATGGAGTAAACATCTTTTCTATGCCTTAGTACCTTGTCTTGCTCCTTTCTAAGTTT
GGATCAGCTTCCAATATTTTATCCTTTGAGCTTTCCATGACACAAAATTCCTCCAAGAGTTC
CTTTAAAGTGACTTTGTATTCTATAATGTCCCTTCCTCTGGGACATCTTCATCCTTTTTGTC
CCCATGACCTTCCTTATTTATGCTAATACATTTGCCTTCCCTGAGTTCCTCTACACTACCTA
TCTCTCAAATGGCAGCAGGGTCAACATCACCATAGTCTGCTATTCTTTGATAACTCCATTTA
TGCTGTCTTTGAAGTTCACTTCTGGCATTATCACTTTTCATTTCTTTGCTGCATTTTTATCT
TTGTTGGCCAGTTCCCTCTTTTCGTGATACATTGTTGTAAAATCTCATGGGAGTTAGCCACC
TGGAGACAGGGAGGCAACAGAACTACACACTTTGCTGTCTGTGCATAAATTGAAGAGCAGAA
GCTCAGTGACCAATCACTGATGGACTTTGAAAGGAGTGACAGTAATTGGCCCTCAATTATGA
TGCTTATCTTTTATTTATGTCGTGATTTCTAGACTGAAGAGTTAGCAACAAAGTTTATACCA
TATGCAACTACTCGTGATCAATATACCAAGGTACTGAAAAAGAACCATGTCACTGGGCTACT
AGTGTTATTTAACTGAATCATGCAGAGTGAGGGCTGCCTGTATTCTTGCCTTGTTTTCTAGA
ACTGAAGCATGGAGGGTCAAATAATGCATCCAATGTTATTTAGAGCTGGAATTTGAATCCAT
GCAGTTGGGTGCAGAGTCTGAGCTCTTAATCACCTTGACCATTACATTACCTTGCTTTTTAT
TTCCTTTGGGGAAATGTTTCCTAAAAAATGTAACGCCCCTCTGTGCTGCTATGTGGGAATCA
GAAGTCTCAGTGCCTGATCAGACCTCCTTGTCCAGGAACAGACCCTTGGGGCTGACCCCTCC
TTGGGACCCAATGCCCTTCTTTCTGCACTATCCAGGTACCGGGGAGACCAGGATGCCACTAT
GTCTATATTGGACATATCCATGATGACTGGCTTTGCTCCAGACACAGATGACCTGAAGCAGG
TATGAAGGGCTCAGGAGCTGGGATAAGTGGAAAGGAGCCTGGGTTCTGGAAGAGGCTGCAGG
GAGAGAGGGGTCCAGGAGGGATTTTTCACAGGCTCCACCTTTCCCCAGCTGGCCAATGGTGT
TGACAGATACATCTCCAAGTATGAGCTGGACAAAGCCTTCTCCGATAGGAACACCCTCATCA
TCTACCTGGACAAGGTAAGGCTGCATCATCCTCCCCTGGGAGGCTTCCAGGGGCACCCTGAC
CTCTATCTGGCTGGTCTTTCTTTTCCTTTCAGCTTTTGTCTCTGGGTCAGACTAACCCTGGG
CCAGAGGAGACAGGGTCTGTGCTGCTGAGTTGTAGGGGAAGGAGCTTGTAAAATAAGGGGGT
CAACCCAGCATCTTCTATAAACATCTCATCTTCTGACCATTTGCCTCCTCCAACTTGTTATC
AGAGTCTTAAACAACCATTGAAAAAAAGCCCTTTTGGTTTTTTTGGTTTTTTTTTTAAGTGC
TTTGTAGAGAGCAAGGTCTTGCCTCGTTCCCTAACCCAATCCTGGGCTTTGTTTCTTTCTTT
GATCTATTTCTCTCTTCTGTTGTTTTCTTTCTTTCAGGAGACAGGGTCTTGCTCTGTCACCC
AGACTGGAGTACAGTGTCTTGATACTAGCTCACTGCAAAGTCAAATTCCTGGGCTCAAGGGA
TCCTCCTGCCTCAGCCACCTGAGGAGCTGGAACTGCAGGCCTGCGACACTGCACCCAGCTAA
TTTTTTTTTCATAAATATTATGCTTTTGTACCCAGCTTTTTTTTTTTTTTTTTTTTAACTGC
AGCCTTGACCTCCCAGGCTTACATGATCCTCCCACCTCTGCTTCCTGAGTAGCTGTGATTAC
AGGTGCATGCCACCATGCCCAGTGAATTAAAAAAAAAAAAAGTTTGTAGATATGGGGTCCCA
CTGTACTGCCTAGGCTGGTCTTAAACTCCTGAGCTCAAGTGATTCTCCCACCTCAGCCTCCT
AAAGTGCTGAGATTACAGGCATAAGCCCCTGGTGCCTGGCCCCAGCTGAATTTTTGTTCTTG
TTTCTTCATAAATATTCTGTGTAAGTACCCAGCTGATTGTTTTATTTTTTGTAGAGATGGGG
GTCTTGATATGTTGCTCAAGTTGGTCTCAAACTACTGGCCTCAAGCGATCTTCCTGCCTCAG
CCTCCCAAAGGGCTGGGATTCCAAGCATGAGCCACCACACCTGCCACCTCTTCTGTTATTTT
CTCTCCATCTGGCATTCTCTGACTCTTTCATCTCTACCATGATTTGGGCTTTCTCCTCTCCC
TTCTCTTATTTCTTCCCATTCTCCTATCCCCATATCCTCCCTGCTAACTCCTGATACCCACA
GGGCCCCTCAATCCCATTTTAGTCAGCTTAAGTAACAATAGCTACTAAAACAAAACCCCTAA
GAATATGGGGTCTTAACACAACAGACTTGTATTTCTCACTCATGTAAAGTCCAGTTGGCATG
GGGGGTAAGGAAGGGTCCCTCTGCTCCATGTAGTCTCTCAGGGATCCAAGCACCTTCCATCC
TGTGGCTCTGCAATCCTTAGGATCTTCTGTAGTTCTCTGCAGGATTCATTCATTCTAGATGG
AAATAAGATTGTGCATGGGTTGTTTTTATGGGCATAGATAGCAATCTGTTCAGCCACCTGGC
CACACCTAATTGAAAGAGGAGCTGAGAAAGGTAGTCTCACTGTGAGTCTAGGAAGAAAAGTA
AATGGATTTGCTGAATTGCTCATTCATCTTTGCCACTTCCTCCTTGATCCTTCAGTTTCTCC
ACCACTGCCTCAGCTCCCAAGACAATGCTGGACTCCCTCCCACATCACCCCACTGACCAAGC
TCCTCCTTCCCCCTCAGGTCTCACACTCTGAGGATGACTGTCTAGCTTTCAAAGTTCACCAA
TACTTTAATGTAGAGCTTATCCAGCCTGGAGCAGTCAAGGTCTACGCCTATTACAACCTGGG
TGAGCAGCCAACCTAGGGCCTGGGGTCTGATGGTTCCAGGGGCCTGAGAGTCCCAGGTATAT
ATGAATTGTGGGGATCTGAGAATGAAGGTCTAAGGAGTCCAGGGATTTGAGCATTCGTAGTA
TGAAGGTCCCACGGGTCTGAGGGTCCCAAGGATCTATGAGTTGAGGTTCTGAGGTTCTGAGG
GGATCTGAGAATGATGGTCTAAGCAGGCCAGGGATTTCAGGATTAGTAATCTGAAGGTCCCA
GGGTCTGAGAGTCCCAAGGATCTATGAGTTGGTTCTAGGGATCTGAGACTTGGGGGTCTGAT
GGGTTCAGGGGTCTCAGGGTCTTAGGAATATGTGAGTTGCAGGGGGTTCTGAAAATAAGGGT
CTAAGGATTCTAGATATATGAGGGTTGGAGGCCTGCGTGTCCCAGGAATCTATGAATTTGGG
GTCTGAGGGTCCCAGGCTTCTGTGAGTTGAGAGTCTAAGAGACTCAAGGGTCTGAGAATCCC
AAAGATCAGAAAGTAGAGGGGGTCTTGGGGTCTGAGGGATCTGAGGGGTTGAAGACCTAGCA
TCTCCAGGTCTGAAGACTGAGAACTGGGGATCTGGGCCTCCCAGGCATGGTCTTTGGAGGGA
GGCCCTTATCCTCTCATCTTCACATCACATCTGCCCGCAGAGGAAAGCTGTACCCGGTTCTA
CCATCCGGAAAAGGAGGATGGAAAGCTGAACAAGCTCTGCCGTGATGAACTGTGCCGCTGTG
CTGAGGGTGAGTTCCCTGGAGCCGGGAACAGGTGGGTCTGAGCAAGCCACACTTACCCAGGT
CATCTATCCCATGGTCAGGGACCCCCAGACCCATACCCAGGGGATACCAAGGGGGGTAGGCT
CCCAGGGCTGGCCACACCCATGGGCAGTAGGCCCCAGATAAGGAGTGGGACTTAGACCCTGT
CTCCACCCCACCCTGCAGAGAATTGCTTCATACAAAAGTCGGATGACAAGGTCACCCTGGAA
GAACGGCTGGACAAGGCCTGTGAGCCAGGAGTGGACTATGGTGAGTGGGTGATGGGTGGGGG
TCACGCATGTTTAGCTGTGTGTGTCCAATTGTGTGGTGGGTGGTAGGTGTGGTTGTCATGGT
GTGGCTTCAGGCTGTGGGTGTGGGTGACTGTGGTGTGTGTGAGAGCATGTATTGTGAGGGGC
CATGATTGTGTGGGGAACCATGACTGTGAGTGGCCTAGGTATGCTCATGTGAGAAAAGGTAG
ATGTGGTTGTATGCATCATTGCGTGGGTGGCTGTGAGGTTGTAGTTGTGTGTGGCTGTGGTT
GTGTGAGGCTGTGTGGTTGTAGATGGCAGTGAGTGTGAGGTCCTGAAGTTACGTATATGACT
GTAGTTTTCCGTGGCTATGGTTGTGTGCATGGCCATGAGGCTACAGTATTTTGTGCATATGA
GTCACTCTCATTGCATAGTATGAATAGTATGTTACTAGACATTGTGGGTGGCTGTGACCTCT
GTGCATGCCTATGAGCACGACTGTGTGTGGATGGTGACATGGGACCCTCTATGGTTGTGTGT
GTAATGAGGGGTGGGCCATAGTGTGACTGGCTGTGATTCTGCAACTTTCTGCTTGGGAGAGA
GAGCCACATGCCCGGGTGCACTTGCAAACCAGGGTGCCCCTCATGGTCAACCTAGCCCACCA
CCCAAACTGTCTGCCTCTCCCCCACAGTGTACAAGACCCGACTGGTCAAGGTTCAGCTGTCC
AATGACTTTGACGAGTACATCATGGCCATTGAGCAGACCATCAAGTCAGGTCAGGCTCAGCA
CGCTGCCTCCCGTGGCTCTTCCCTGGCTTCCTCCCCACGACTCAGCTTCTTCCCTCTCCCCT
CCACTCCAGGCTCGGATGAGGTGCAGGTTGGACAGCAGCGCACGTTCATCAGCCCCATCAAG
TGCAGAGAAGCCCTGAAGCTGGAGGAGAAGAAACACTACCTCATGTGGGGTCTCTCCTCCGA
TTTCTGGGGAGAGAAGCCCAAGTGAGTGCTTTCCCTGCGCGTGCGCGCGACCGCCCGACTGC
CCCGCCCATGCCACGCCCACACCATTGTCACGCCCCTGCGCCACGCCCACACCACGCCCCTT
CCTGACCTGCCATTCTTCCCTCCAGCCTCAGCTACATCATCGGGAAGGACACTTGGGTGGAG
CACTGGCCCGAGGAGGACGAATGCCAAGACGAAGAGAACCAGAAACAATGCCAGGACCTCGG
CGCCTTCACCGAGAGCATGGTTGTCTTTGGGTGCCCCAACTGACCACACCCCCATTCCCCCA
CTCCAGATAAAGCTTCAGTTATATCTCACGTGTCTGGAGTTCTTTGCCAAGAGGGAGAGGCT
GAAATCCCCAGCCGCCTCACCTGCAGCTCAGCTCCATCCTACTTGAAACCTCACCTGTTCCC
ACCGCATTTTCTCCTGGCGTTCGCCTGCTAGTGTG.

[0070] By “adenine” or “9H-Purin-6-amine” is meant a purine nucleobase with the molecular formula C₅H₅N₅, having the structure

[chemical structure]

and corresponding to CAS No. 73-24-5.

[0071] By “adenosine” or “4-Amino-1-[(2R,3R,4S,5R)-3,4-dihydroxy-5-(hydroxymethyl)oxolan-2-yl]pyrimidin-2(1H)-one” is meant an adenine molecule attached to a ribose sugar via a glycosidic bond, having the structure

[chemical structure]

and corresponding to CAS No. 65-46-3. Its molecular formula is C₁₀H₁₃N₅O₄.

[0072] By “adenosine deaminase” or “adenine deaminase” is meant a polypeptide or fragment thereof capable of catalyzing the hydrolytic deamination of adenine or adenosine.

[0073] In some embodiments, the deaminase or deaminase domain is an adenosine deaminase catalyzing the hydrolytic deamination of adenosine to inosine or deoxy adenosine to deoxyinosine. In some embodiments, the adenosine deaminase catalyzes the hydrolytic deamination of adenine or adenosine in deoxyribonucleic acid (DNA). The adenosine deaminases (e.g., engineered adenosine deaminases, evolved adenosine deaminases) provided herein may be from any organism (e.g., eukaryotic, prokaryotic), including but not limited to algae, bacteria, fungi, plants, invertebrates (e.g., insects), and vertebrates (e.g., amphibians, mammals). In some embodiments, the adenosine deaminase is an adenosine deaminase variant with one or more alterations and is capable of deaminating both adenine and cytosine in a target polynucleotide (e.g., DNA, RNA) and may be referred to as a “dual deaminase”. Non-limiting examples of dual deaminases include those described in PCT/US22/22050. In some embodiments, the target polynucleotide is single or double stranded. In some embodiments, the adenosine deaminase variant is capable of deaminating both adenine and cytosine in DNA. In some embodiments, the adenosine deaminase variant is capable of deaminating both adenine and cytosine in single-stranded DNA. In some embodiments, the adenosine deaminase variant is capable of deaminating both adenine and cytosine in RNA. In embodiments, the adenosine deaminase variant is selected from those described in PCT/US2020/018192, PCT/US2020/049975, PCT/US2017/045381, and PCT/US2020/028568, the full contents of which are each incorporated herein by reference in their entireties for all purposes.

[0074] By “adenosine deaminase activity” is meant catalyzing the deamination of adenine or adenosine to guanine in a polynucleotide. In some embodiments, an adenosine deaminase variant as provided herein maintains adenosine deaminase activity (e.g., at least about 30%, 40%, 50%, 60%, 70%, 80%, 90% or more of the activity of a reference adenosine deaminase (e.g., TadA*8.20 or TadA*8.19)).

[0075] By “Adenosine Base Editor (ABE)” is meant a base editor comprising an adenosine deaminase.

[0076] By “Adenosine Base Editor (ABE) polynucleotide” is meant a polynucleotide encoding an ABE. By “Adenosine Base Editor 8 (ABE8) polypeptide” or “ABE8” is meant a base editor as defined herein comprising an adenosine deaminase or adenosine deaminase variant comprising one or more of the alterations listed in Table 5B, one of the combinations of alterations listed in Table 5B, or an alteration at one or more of the amino acid positions listed in Table 5B, where such alterations are relative to the following reference sequence: MSEVEFSHEYWMRHALTLAKRARDEREVPVGAVLVLNNRVIGEGWNRAIGLHDPTAHAEIMA LRQGGLVMQNYRLIDATLYVTFEPCVMCAGAMIHSRIGRVVFGVRNAKTGAAGSLMDVLHYP GMNHRVEITEGILADECAALLCYFFRMPRQVFNAQKKAQSSTD (SEQ ID NO: 1), or a corresponding position in another adenosine deaminase. In embodiments, ABE8 comprises alterations at amino acids 82 and/or 166 of SEQ ID NO: 1. In some embodiments, ABE8 comprises further alterations, as described herein, relative to the reference sequence.

[0077] By “Adenosine Base Editor 8 (ABE8) polynucleotide” is meant a polynucleotide encoding an ABE8 polypeptide.

[0078] “Administering” is referred to herein as providing one or more compositions described herein to a patient or a subject.

[0079] “Administering” is referred to herein as providing one or more compositions described herein to a patient or a subject. By way of example and without limitation, composition administration (e.g., injection) can be performed by intravenous (i.v.) injection, sub-cutaneous (s.c.) injection, intradermal (i.d.) injection, intraperitoneal (i.p.) injection, or intramuscular (i.m.) injection. One or more such routes can be employed. Parenteral administration can be, for example, by bolus injection or by gradual perfusion over time. In some embodiments, parenteral administration includes infusing or injecting intravascularly, intravenously, intramuscularly, intraarterially, intrathecally, intratumorally, intradermally, intraperitoneally, transtracheally, subcutaneously, subcuticularly, intraarticularly, subcapsularly, subarachnoidly and intrasternally. Alternatively, or concurrently, administration can be by the oral route.

[0080] By “agent” is meant any small molecule chemical compound, antibody, nucleic acid molecule, or polypeptide, or fragments thereof.

[0081] By “alteration” is meant a change in the level, structure, or activity of an analyte, gene or polypeptide as detected by standard art known methods such as those described herein. As used herein, an alteration includes a change (e.g., increase or decrease) in expression levels. In embodiments, the increase or decrease in expression levels is by 10%, 25%, 40%, 50% or greater. In some embodiments, an alteration includes an insertion, deletion, or substitution of a nucleobase or amino acid (by, e.g., genetic engineering).

[0082] By “ameliorate” is meant decrease, suppress, attenuate, diminish, arrest, or stabilize the development or progression of a disease.

[0083] By “analog” is meant a molecule that is not identical but has analogous functional or structural features. For example, a polypeptide analog retains the biological activity of a corresponding naturally occurring polypeptide, while having certain biochemical modifications that enhance the analog's function relative to a naturally occurring polypeptide. Such biochemical modifications could increase the analog's protease resistance, membrane permeability, or half-life, without altering, for example, ligand binding. An analog may include an unnatural amino acid.

[0084] By “base editor (BE),” or “nucleobase editor polypeptide (NBE)” is meant an agent that binds a polynucleotide and has nucleobase modifying activity. In various embodiments, the base editor comprises a nucleobase modifying polypeptide (e.g., a deaminase) and a polynucleotide programmable nucleotide binding domain (e.g., Cas9 or Cpfl) in conjunction with a guide polynucleotide (e.g., guide RNA (gRNA)). Representative nucleic acid and protein sequences of base editors include those sequences with about or at least about 85% sequence identity to any base editor sequence provided in the sequence listing, such as those corresponding to SEQ ID NOs: 2-11.

[0085] By “base editing activity” is meant acting to chemically alter a base within a polynucleotide. In one embodiment, a first base is converted to a second base. In one embodiment, the base editing activity is cytidine deaminase activity, e.g., converting target C·G to T·A. In another embodiment, the base editing activity is adenosine or adenine deaminase activity, e.g., converting A·T to G·C.

[0086] The term “base editor system” refers to an intermolecular complex for editing a nucleobase of a target nucleotide sequence. In various embodiments, the base editor (BE) system comprises (1) a polynucleotide programmable nucleotide binding domain, a deaminase domain (e.g., cytidine deaminase or adenosine deaminase) for deaminating nucleobases in the target nucleotide sequence; and (2) one or more guide polynucleotides (e.g., guide RNA) in conjunction with the polynucleotide programmable nucleotide binding domain. In various embodiments, the base editor (BE) system comprises a nucleobase editor domain selected from an adenosine deaminase or a cytidine deaminase, and a domain having nucleic acid sequence specific binding activity. In some embodiments, the base editor system comprises (1) a base editor (BE) comprising a polynucleotide programmable DNA binding domain and a deaminase domain for deaminating one or more nucleobases in a target nucleotide sequence; and (2) one or more guide RNAs in conjunction with the polynucleotide programmable DNA binding domain. In some embodiments, the polynucleotide programmable nucleotide binding domain is a polynucleotide programmable DNA binding domain. In some embodiments, the base editor is a cytidine base editor (CBE). In some embodiments, the base editor is an adenine or adenosine base editor (ABE). In some embodiments, the base editor is an adenine or adenosine base editor (ABE) or a cytidine or cytosine base editor (CBE). In some embodiments, the base editor system (e.g., a base editor system comprising a cytidine deaminase) comprises a uracil glycosylase inhibitor or other agent or peptide (e.g., a uracil stabilizing protein such as provided in WO2022015969, the disclosure of which is incorporated herein by reference in its entirety for all purposes) that inhibits the inosine base excision repair system.

[0087] By “BE3” is meant a base editor comprising a cytidine deamianse domain, a nucleic acid programmable DNA binding protein domain (napDNAbp), and a single uracil glycosylase inhibitor domain. In some embodiments, the npDNAbp is an SpCas9 (DTOA) nickase domain.

[0088] By “BE4” is meant a base editor comprising a cytidine deaminase domain, a nucleic acid programmable DNA binding protein domain (napDNAbp), and two uracil glycosylase inhibitor domains. In some embodiments, the npDNAbp is an SpCas9 (DTOA) nickase domain.

[0089] The term “Cas9” or “Cas9 domain” refers to an RNA guided nuclease comprising a Cas9 protein, or a fragment thereof (e.g., a protein comprising an active, inactive, or partially active DNA cleavage domain of Cas9, and/or the gRNA binding domain of Cas9). A Cas9 nuclease is also referred to sometimes as a casnl nuclease or a CRISPR (clustered regularly interspaced short palindromic repeat) associated nuclease.

[0090] The term “conservative amino acid substitution” or “conservative mutation” refers to the replacement of one amino acid by another amino acid with a common property. A functional way to define common properties between individual amino acids is to analyze the normalized frequencies of amino acid changes between corresponding proteins of homologous organisms (Schulz, G. E. and Schirmer, R. H., Principles of Protein Structure, Springer-Verlag, New York (1979)). According to such analyses, groups of amino acids can be defined where amino acids within a group exchange preferentially with each other, and therefore resemble each other most in their impact on the overall protein structure (Schulz, G. E. and Schirmer, R. H., supra). Non-limiting examples of conservative mutations include amino acid substitutions of amino acids, for example, lysine for arginine and vice versa such that a positive charge can be maintained; glutamic acid for aspartic acid and vice versa such that a negative charge can be maintained; serine for threonine such that a free —OH can be maintained; and glutamine for asparagine such that a free —NH₂ can be maintained.

[0091] The term “coding sequence” or “protein coding sequence” as used interchangeably herein refers to a segment of a polynucleotide that codes for a protein. Coding sequences can also be referred to as open reading frames. The region or sequence is bounded nearer the 5′ end by a start codon and nearer the 3′ end with a stop codon. Stop codons useful with the base editors described herein include the following: TAG, TAA, and TGA.

[0092] By “complex” is meant a combination of two or more molecules whose interaction relies on inter-molecular forces. Non-limiting examples of inter-molecular forces include covalent and non-covalent interactions. Non-limiting examples of non-covalent interactions include hydrogen bonding, ionic bonding, halogen bonding, hydrophobic bonding, van der Waals interactions (e.g., dipole-dipole interactions, dipole-induced dipole interactions, and London dispersion forces), and π-effects. In an embodiment, a complex comprises polypeptides, polynucleotides, or a combination of one or more polypeptides and one or more polynucleotides. In one embodiment, a complex comprises one or more polypeptides that associate to form a base editor (e.g., base editor comprising a nucleic acid programmable DNA binding protein, such as Cas9, and a deaminase) and a polynucleotide (e.g., a guide RNA). In an embodiment, the complex is held together by hydrogen bonds. It should be appreciated that one or more components of a base editor (e.g., a deaminase, or a nucleic acid programmable DNA binding protein) may associate covalently or non-covalently. As one example, a base editor may include a deaminase covalently linked to a nucleic acid programmable DNA binding protein (e.g., by a peptide bond). Alternatively, a base editor may include a deaminase and a nucleic acid programmable DNA binding protein that associate noncovalently (e.g., where one or more components of the base editor are supplied in trans and associate directly or via another molecule such as a protein or nucleic acid). In an embodiment, one or more components of the complex are held together by hydrogen bonds.

[0093] By “cytosine” or “4-Aminopyrimidin-2(1H)-one” is meant a purine nucleobase with the molecular formula C₄H₅N₃O, having the structure

[chemical structure]

and corresponding to CAS No. 71-30-7.

[0094] By “cytidine” is meant a cytosine molecule attached to a ribose sugar via a glycosidic bond, having the structure

[chemical structure]

and corresponding to CAS No. 65-46-3. Its molecular formula is C9H13N305.

[0095] By “Cytidine Base Editor (CBE)” is meant a base editor comprising a cytidine deaminase.

[0096] By “Cytidine Base Editor (CBE) polynucleotide” is meant a polynucleotide encoding a CBE.

[0097] By “cytidine deaminase” or “cytosine deaminase” is meant a polypeptide or fragment thereof capable of deaminating cytidine or cytosine. In embodiments, the cytidine or cytosine is present in a polynucleotide. In one embodiment, the cytidine deaminase converts cytosine to uracil or 5-methylcytosine to thymine. The terms “cytidine deaminase” and “cytosine deaminase” are used interchangeably throughout the application. Petromyzon marinus cytosine deaminase 1 (PmCDA1) (SEQ ID NO: 13-14), Activation-induced cytidine deaminase (AICDA) (SEQ ID NOs: 15-21), and APOBEC (SEQ ID NOs: 12-61) are exemplary cytidine deaminases. Further exemplary cytidine deaminase (CDA) sequences are provided in the Sequence Listing as SEQ ID NOs: 62-189. Non-limiting examples of cytidine deaminases include those described in PCT/US20/16288, PCT/US2018/021878, 180802-021804/PCT, PCT/US2018/048969, and PCT/US2016/058344. By “cytosine deaminase activity” is meant catalyzing the deamination of cytosine or cytidine. In one embodiment, a polypeptide having cytosine deaminase activity converts an amino group to a carbonyl group. In an embodiment, a cytosine deaminase converts cytosine to uracil (i.e., C to U) or 5-methylcytosine to thymine (i.e., 5mC to T). In some embodiments, a cytosine deaminase as provided herein has increased cytosine deaminase activity (e.g., at least 10-fold, 20-fold, 30-fold, 40-fold, 50-fold, 60-fold, 70-fold, 80-fold, 90-fold, 100-fold or more) relative to a reference cytosine deaminase.

[0098] The term “deaminase” or “deaminase domain,” as used herein, refers to a protein or fragment thereof that catalyzes a deamination reaction.

[0099] “Detect” refers to identifying the presence, absence or amount of the analyte to be detected. In one embodiment, a sequence alteration in a polynucleotide or polypeptide is detected. In another embodiment, the presence of indels is detected.

[0100] By “detectable label” is meant a composition that when linked to a molecule of interest renders the latter detectable, via spectroscopic, photochemical, biochemical, immunochemical, or chemical means. For example, useful labels include radioactive isotopes, magnetic beads, metallic beads, colloidal particles, fluorescent dyes, electron-dense reagents, enzymes (for example, as commonly used in an enzyme linked immunosorbent assay (ELISA)), biotin, digoxigenin, or haptens.

[0101] By “disease” is meant any condition or disorder that damages or interferes with the normal function of a cell, tissue, or organ. Exemplary diseases include diseases amenable to treatment with involving introducing an alteration to a complement component 3 polynucleotide in a cell that results in a reduction in activity and/or expression of a complement 3 polypeptide in the cell. In some instances, the disease is a disease associated with inappropriate activation of the complement system in the subject. Non-limiting examples of diseases associated with inappropriate activation of the complement system include blood disorders, transplant or graft rejection, inflammatory diseases or disorders, eye diseases or disorders, kidney diseases or disorders, heart disorders, respiratory diseases or disorders, autoimmune disorders, inflammatory bowel diseases or disorders, arthritis, neurodegenerative diseases or disorders, musculoskeletal diseases or disorders associated with inflammation, disorders affecting the integumentary system, diseases or disorders affecting the central nervous system, diseases or disorders affecting the circulatory system, diseases or disorders affecting the gastrointestinal system, diseases or disorders affecting the thyroid, chronic pain, allergies, and pulmonary diseases. Further non-limiting examples of diseases associated with inappropriate activation of the complement system include paroxysmal nocturnal hemoglobinuria (PNH), atypical hemolytic syndrome (aHUS), HELLP syndrome, autoimmune hemolytic anemia, transplant rejection, ischemia/reperfusion injury, transplant damage, hyperacute rejection, graft rejection or failure, acute antibody-mediated rejection, chronic inflammation, chronic allograft vasculopathy, chronic rejection of a transplant or graft, age-related macular degeneration (e.g., wet or dry age-related macular degeneration), diabetic retinopathy, glaucoma, uveitis, autoimmune diseases, myasthenia gravis, neuromyelitis optica (NMO), renal disease, membranoproliferative glomerulonephritis (MPGN) (e.g., MPGN type I, type II, or type III), IgA nepropathy (IgAN), primary membranous nephropathy, C3 glomerulopathy, proteinuria, a neurodegenerative disease, neuropathic pain, rhinosinusitis, nasal polyposis, cancer, sepsis, respiratory distress syndrome, anaphylaxis, infusion reaction, a respiratory disease or disorder (e.g., asthma or chronic obstructive pulmonary disease (COPD), oridiopathic pulmonary fibrosis, or asthma), a Th2-associated disorder (e.g., a disorder associated with high levels or high activation of CD4+ helper T cells of the Th2 subtype), a disorder associated with high levels or inappropriate activity of CD4+ helper T cells of the Th17 subtype, inflammatory bowel disease (e.g., Crohn's disease or ulcerative colitis), inflammatory skin diseases, a chronic inflammatory disease, psoriasis, atopic dermatitis, systemic scleroderma, sclerosis, Bechet's disease, dermatomyositis, polymyositis, multiple sclerosis (MS), dermatitis, meningitis, encephalitis, uveitis, osteoarthritis, lupus nephritis, rheumatoid arthritis (RA), Sjogren's syndrome, vasculitis, central nervous system (CNS) inflammatory disorders, chronic hepatitis, chronic pancreatitis, glomerulonephritis, sarcoidosis, thyroidoisis, pathologic immune responses to tissue/organ transplantation, bronchiolitis, hypersensitivity pneumonitis, idiopathic pulmonary fibrosis (IPF), periodontitis, gingivitis, a disorder associated with excessive or inappropriate activity of IgE-producing cells, neuromyelitis optica, pemphigoid, pulmonary fibrosis (e.g., idiopathic pulmonary fibrosis), radiation-induced lung injury, allergic bronchopulmonary aspergillosis, hypersensitivity pneumonitis, eosinophilic pneumonia, interstitial pneumonia, sarcoid, Wegener's granulomatosis, bronchiolitis obliteranse, allergic rhinitis, an inflammatory joint condition (e.g., arthritis such as rheumatoid arthritis or psoriatic arthritis, juvenile chronic arthritis, spondyloarthropathies Reither's syndrome, or gout), a dermatomyositis, polymyositis, chronic muscle inflammation, pemphigus, systemic lupus erythematosus, dermatomyositis, scleroderma, sclerodermatomyositis, Sjogren syndrome, chronic urticaria, a demyelinating disease, amyotrophic lateral sclerosis, chronic pain, stroke, allergic neuritis, Huntington's disease, Alzheimer's disease, Parkinson's disease, a disease of the circulatory system, polyarteritis nodosa, Wegener's granulomatosis, giant cell arteritis, Churg-Strauss syndrome, microscopic polyangiitis, Henoch-Schonlein purpura, Takayasu's arteritis, Kawasaki disease, Behcet's disease, ulcerative colitis, thyroiditis (e.g., Hashimoto's thyroiditis, Graves' disease, post-partum thyroiditis), myocarditis, hepatitis (e.g., hepatitis C), pancreatitis, glomerulonephritis (e.g., membranoproliferative glomerulonephritis or membranous glomerulonephritis), panniculitis, eye disorders, choroidal neovascularization (CNV), retinal neovascularization (RNV), ocular inflammation, retinopathy of prematurity, proliferative vitreoretinopathy, uveitis, keratitis, conjunctivitis, and scleritis, geographic atrophy, conjunctivitis, keratitis, scleritis, iritis, iridocyclitis, cyclitis, pars planitis, choroiditis, persistent asthma, and allergic asthma.

[0102] By “dual editing activity” or “dual deaminase activity” is meant having adenosine deaminase and cytidine deaminase activity. In one embodiment, a base editor having dual editing activity has both A→G and C→T activity, wherein the two activities are approximately equal or are within about 10% or 20% of each other. In another embodiment, a dual editor has A→G activity that no more than about 10% or 20% greater than C-4T activity. In another embodiment, a dual editor has A→G activity that is no more than about 10% or 20% less than C→T activity. In some embodiments, the adenosine deaminase variant has predominantly cytosine deaminase activity, and little, if any, adenosine deaminase activity. In some embodiments, the adenosine deaminase variant has cytosine deaminase activity, and no significant or no detectable adenosine deaminase activity.

[0103] By “effective amount” is meant the amount of an agent or active compound, e.g., a base editor as described herein, that is required to ameliorate the symptoms of a disease relative to an untreated patient or an individual without disease, i.e., a healthy individual, or is the amount of the agent or active compound sufficient to elicit a desired biological response. The effective amount of active compound(s) used to practice the present disclosure for therapeutic treatment of a disease varies depending upon the manner of administration, the age, body weight, and general health of the subject. Ultimately, the attending physician or veterinarian will decide the appropriate amount and dosage regimen. Such amount is referred to as an “effective” amount. In one embodiment, an effective amount is the amount of a base editor of the disclosure sufficient to introduce an alteration in a gene of interest in a cell (e.g., a cell in vitro or in vivo). In one embodiment, an effective amount is the amount of a base editor required to achieve a therapeutic effect. Such therapeutic effect need not be sufficient to alter a pathogenic gene in all cells of a subject, tissue or organ, but only to alter the pathogenic gene in about 1%, 5%, 10%, 25%, 50%, 75% or more of the cells present in a subject, tissue or organ. In one embodiment, an effective amount is sufficient to ameliorate one or more symptoms of a disease.

[0104] By “fragment” is meant a portion of a polypeptide or nucleic acid molecule. This portion contains, at least about 10%, 20%, 30%, 40%, 50%, 60%, 70%, 80%, or 90% of the entire length of the reference nucleic acid molecule or polypeptide. A fragment may contain 10, 20, 30, 40, 50, 60, 70, 80, 90, or 100, 200, 300, 400, 500, 600, 700, 800, 900, or 1000 nucleotides or amino acids. In some embodiments, the fragment is a functional fragment. By “guide polynucleotide” is meant a polynucleotide or polynucleotide complex which is specific for a target sequence and can form a complex with a polynucleotide programmable nucleotide binding domain protein (e.g., Cas9 or Cpfl). In an embodiment, the guide polynucleotide is a guide RNA (gRNA). gRNAs can exist as a complex of two or more RNAs, or as a single RNA molecule.

[0105] “Hybridization” means hydrogen bonding, which may be Watson-Crick, Hoogsteen or reversed Hoogsteen hydrogen bonding, between complementary nucleobases. For example, adenine and thymine are complementary nucleobases that pair through the formation of hydrogen bonds.

[0106] By “inappropriate activation” in the context of C3 is meant any increase in complement activation that is associated with a disease or disorder. In an embodiment, inappropriate activation is activation that is increased or elevated locally (e.g., in an organ or tissue, such as in the central nervous system or in an eye) or systemically relative to a healthy reference (e.g., a healthy subject). In some instances, “inappropriate activation” is activation that is associated with chronic (e.g., lasting more than 1, 2, 3, 4, 5, 6, 7, 8, 9, 10, 11, 12, 13, 14, or 15 weeks) inflammation in a subject. In some cases, inappropriate activation is activation that is directed against a tissue, cell, or organ of a subject and/or that leads to undesired damage to the tissue, cell, or organ of the subject. In embodiments, a disease or disorder associated with inappropriate activation of the complement system can be treated by any of the methods or compositions provided herein for reducing or eliminating expression and/or activity of a C₃ polypeptide. In an embodiment, complement activation is detected by measuring levels of a C₃ polypeptide and/or of a cleaved C3 polypeptide (e.g., a C3a fragment or a C3b fragment), where inappropriate activation can be determined as high levels of the C3 polypeptide and/or cleaved C3 polypeptide relative to a healthy reference subject.

[0107] By “increases” is meant a positive alteration of at least 10%, 25%, 50%, 75%, or 100%, or about 1.5 fold, about 2 fold, about 3-fold, about 4-fold, about 5-fold, about 6-fold, about 7-fold, about 8-fold, about 9-fold, about 10-fold, about 15-fold, about 20-fold, about 25-fold, about 30-fold, about 35-fold, about 40-fold, about 45-fold, about 50-fold, or about 100-fold.

[0108] The terms “inhibitor of base repair”, “base repair inhibitor”, “IBR” or their grammatical equivalents refer to a protein that is capable in inhibiting the activity of a nucleic acid repair enzyme, for example a base excision repair enzyme.

[0109] An “intein” is a fragment of a protein that is able to excise itself and join the remaining fragments (the exteins) with a peptide bond in a process known as protein splicing.

[0110] The terms “isolated,” “purified,” or “biologically pure” refer to material that is free to varying degrees from components which normally accompany it as found in its native state. “Isolate” denotes a degree of separation from original source or surroundings. “Purify” denotes a degree of separation that is higher than isolation. A “purified” or “biologically pure” protein is sufficiently free of other materials such that any impurities do not materially affect the biological properties of the protein or cause other adverse consequences. That is, a nucleic acid or peptide of this disclosure is purified if it is substantially free of cellular material, viral material, or culture medium when produced by recombinant DNA techniques, or chemical precursors or other chemicals when chemically synthesized. Purity and homogeneity are typically determined using analytical chemistry techniques, for example, polyacrylamide gel electrophoresis or high performance liquid chromatography. The term “purified” can denote that a nucleic acid or protein gives rise to essentially one band in an electrophoretic gel. For a protein that can be subjected to modifications, for example, phosphorylation or glycosylation, different modifications may give rise to different isolated proteins, which can be separately purified.

[0111] By “isolated polynucleotide” is meant a nucleic acid molecule that is free of the genes which, in the naturally-occurring genome of the organism from which the nucleic acid molecule of the disclosure is derived, flank the gene. The term therefore includes, for example, a recombinant DNA that is incorporated into a vector; into an autonomously replicating plasmid or virus; or into the genomic DNA of a prokaryote or eukaryote; or that exists as a separate molecule (for example, a cDNA or a genomic or cDNA fragment produced by PCR or restriction endonuclease digestion) independent of other sequences. In addition, the term includes an RNA molecule that is transcribed from a DNA molecule, as well as a recombinant DNA that is part of a hybrid gene encoding additional polypeptide sequence.

[0112] By an “isolated polypeptide” is meant a polypeptide of the disclosure that has been separated from components that naturally accompany it. Typically, the polypeptide is isolated when it is at least 60%, by weight, free from the proteins and naturally-occurring organic molecules with which it is naturally associated. In embodiments, the preparation is at least 75%, at least 90%, or at least 99%, by weight, a polypeptide of the disclosure. An isolated polypeptide of the disclosure may be obtained, for example, by extraction from a natural source, by expression of a recombinant nucleic acid encoding such a polypeptide; or by chemically synthesizing the protein. Purity can be measured by any appropriate method, for example, column chromatography, polyacrylamide gel electrophoresis, or by HPLC analysis.

[0113] The term “linker”, as used herein, refers to a molecule that links two moieties. In one embodiment, the term “linker” refers to a covalent linker (e.g., covalent bond) or a non-covalent linker.

[0114] By “marker” is meant any protein or polynucleotide having an alteration in expression, level, structure, or activity that is associated with a disease or disorder. In embodiments, the disease or disorder is associated with inappropriate activation of the complement system. In some cases, the marker is a C3 polynucleotide or polypeptide.

[0115] The term “mutation,” as used herein, refers to a substitution of a residue within a sequence, e.g., a nucleic acid or amino acid sequence, with another residue, or a deletion or insertion of one or more residues within a sequence. Mutations are typically described herein by identifying the original residue followed by the position of the residue within the sequence and by the identity of the newly substituted residue. Various methods for making the amino acid substitutions (mutations) provided herein are well known in the art, and are provided by, for example, Green and Sambrook, Molecular Cloning: A Laboratory Manual (4^{th} ed., Cold Spring Harbor Laboratory Press, Cold Spring Harbor, N.Y. (2012)).

[0116] The terms “nucleic acid” and “nucleic acid molecule,” as used herein, refer to a compound comprising a nucleobase and an acidic moiety, e.g., a nucleoside, a nucleotide, or a polymer of nucleotides. Typically, polymeric nucleic acids, e.g., nucleic acid molecules comprising three or more nucleotides are linear molecules, in which adjacent nucleotides are linked to each other via a phosphodiester linkage. In some embodiments, “nucleic acid” refers to individual nucleic acid residues (e.g., nucleotides and/or nucleosides). In some embodiments, “nucleic acid” refers to an oligonucleotide chain comprising three or more individual nucleotide residues. As used herein, the terms “oligonucleotide” and “polynucleotide” can be used interchangeably to refer to a polymer of nucleotides (e.g., a string of at least three nucleotides). In some embodiments, “nucleic acid” encompasses RNA as well as single and/or double-stranded DNA. Nucleic acids may be naturally occurring, for example, in the context of a genome, a transcript, an mRNA, tRNA, rRNA, siRNA, snRNA, a plasmid, cosmid, chromosome, chromatid, or other naturally occurring nucleic acid molecule. On the other hand, a nucleic acid molecule may be a non-naturally occurring molecule, e.g., a recombinant DNA or RNA, an artificial chromosome, an engineered genome, or fragment thereof, or a synthetic DNA, RNA, DNA/RNA hybrid, or including non-naturally occurring nucleotides or nucleosides. Furthermore, the terms “nucleic acid,” “DNA,” “RNA,” and/or similar terms include nucleic acid analogs, e.g., analogs having other than a phosphodiester backbone. Nucleic acids can be purified from natural sources, produced using recombinant expression systems and optionally purified, chemically synthesized, etc. Where appropriate, e.g., in the case of chemically synthesized molecules, nucleic acids comprise nucleoside analogs such as analogs having chemically modified bases or sugars, and backbone modifications. A nucleic acid sequence is presented in the 5′ to 3′ direction unless otherwise indicated. In some embodiments, a nucleic acid is or comprises natural nucleosides (e.g. adenosine, thymidine, guanosine, cytidine, uridine, deoxyadenosine, deoxythymidine, deoxyguanosine, and deoxycytidine); nucleoside analogs (e.g., 2-aminoadenosine, 2-thiothymidine, inosine, pyrrolo-pyrimidine, 3-methyl adenosine, 5-methylcytidine, 2-aminoadenosine, C5-bromouridine, C5-fluorouridine, C5-iodouridine, C5-propynyl-uridine, C5-propynyl-cytidine, C5-methylcytidine, 2-aminoadenosine, 7-deazaadenosine, 7-deazaguanosine, 8-oxoadenosine, 8-oxoguanosine, O(6)-methylguanine, and 2-thiocytidine); chemically modified bases; biologically modified bases (e.g., methylated bases); intercalated bases; modified sugars (2′-e.g., fluororibose, ribose, 2′-deoxyribose, arabinose, and hexose); and/or modified phosphate groups (e.g., phosphorothioates and 5′-N-phosphoramidite linkages).

[0117] The term “nuclear localization sequence,” “nuclear localization signal,” or “NLS” refers to an amino acid sequence that promotes import of a protein into the cell nucleus. Nuclear localization sequences are known in the art and described, for example, in Plank et al., International PCT application, PCT/EP2000/011690, filed Nov. 23, 2000, published as WO/2001/038547 on May 31, 2001, the contents of which are incorporated herein by reference for their disclosure of exemplary nuclear localization sequences. In other embodiments, the NLS is an optimized NLS described, for example, by Koblan et al., Nature Biotech. 2018 doi:10.1038/nbt.4172. In some embodiments, an NLS comprises the amino acid sequence KRTADGSEFESPKKKRKV (SEQ ID NO: 190), KRPAATKKAGQAKKKK (SEQ ID NO: 191), KKTELQTTNAENKTKKL (SEQ ID NO: 192), KRGINDRNFWRGENGRKTR (SEQ ID NO: 193), RKSGKIAAIVVKRPRK (SEQ ID NO: 194), PKKKRKV (SEQ ID NO: 195), MDSLLMNRRKFLYQFKNVRWAKGRRETYLC (SEQ ID NO: 196), PKKKRKVEGADKRTADGSEFESPKKKRKV (SEQ ID NO: 328), or RKSGKIAAIVVKRPRKPKKKRKV (SEQ ID NO: 329).

[0118] The term “nucleobase,” “nitrogenous base,” or “base,” used interchangeably herein, refers to a nitrogen-containing biological compound that forms a nucleoside, which in turn is a component of a nucleotide. The ability of nucleobases to form base pairs and to stack one upon another leads directly to long-chain helical structures such as ribonucleic acid (RNA) and deoxyribonucleic acid (DNA). Five nucleobases—adenine (A), cytosine (C), guanine (G), thymine (T), and uracil (U)—are called primary or canonical. Adenine and guanine are derived from purine, and cytosine, uracil, and thymine are derived from pyrimidine. DNA and RNA can also contain other (non-primary) bases that are modified. Non-limiting exemplary modified nucleobases can include hypoxanthine, xanthine, 7-methylguanine, 5,6-dihydrouracil, 5-methylcytosine (m5C), and 5-hydromethylcytosine. Hypoxanthine and xanthine can be created through mutagen presence, both of them through deamination (replacement of the amine group with a carbonyl group). Hypoxanthine can be modified from adenine. Xanthine can be modified from guanine. Uracil can result from deamination of cytosine. A “nucleoside” consists of a nucleobase and a five carbon sugar (either ribose or deoxyribose). Examples of a nucleoside include adenosine, guanosine, uridine, cytidine, 5-methyluridine (m5U), deoxyadenosine, deoxyguanosine, thymidine, deoxyuridine, and deoxycytidine. Examples of a nucleoside with a modified nucleobase includes inosine (I), xanthosine (X), 7-methylguanosine (m7G), dihydrouridine (D), 5-methylcytidine (m5C), and pseudouridine (Ψ). A “nucleotide” consists of a nucleobase, a five carbon sugar (either ribose or deoxyribose), and at least one phosphate group. Non-limiting examples of modified nucleobases and/or chemical modifications that a modified nucleobase may include are the following: pseudo-uridine, 5-Methyl-cytosine, 2′-O-methyl-3′-phosphonoacetate, 2′-O-methyl thioPACE (MSP), 2′-O-methyl-PACE (MP), 2′-fluoro RNA (2′-F-RNA), constrained ethyl (S-cEt), 2′-O-methyl (‘M’), 2′-O-methyl-3′-phosphorothioate (‘MS’), 2′-O-methyl-3′-thiophosphonoacetate (‘MSP’), 5-methoxyuridine, phosphorothioate, and N1-Methylpseudouridine.

[0119] The term “nucleic acid programmable DNA binding protein” or “napDNAbp” may be used interchangeably with “polynucleotide programmable nucleotide binding domain” to refer to a protein that associates with a nucleic acid (e.g., DNA or RNA), such as a guide nucleic acid or guide polynucleotide (e.g., gRNA), that guides the napDNAbp to a specific nucleic acid sequence. In some embodiments, the polynucleotide programmable nucleotide binding domain is a polynucleotide programmable DNA binding domain. In some embodiments, the polynucleotide programmable nucleotide binding domain is a polynucleotide programmable RNA binding domain. In some embodiments, the polynucleotide programmable nucleotide binding domain is a Cas9 protein. A Cas9 protein can associate with a guide RNA that guides the Cas9 protein to a specific DNA sequence that is complementary to the guide RNA. In some embodiments, the napDNAbp is a Cas9 domain, for example a nuclease active Cas9, a Cas9 nickase (nCas9), or a nuclease inactive Cas9 (dCas9). Non-limiting examples of nucleic acid programmable DNA binding proteins include, Cas9 (e.g., dCas9 and nCas9), Cas12a/Cpfl, Cas12b/C2cl, Cas12c/C2c3, Cas12d/CasY, Cas12e/CasX, Cas12g, Cas12h, Cas12i, and Cas12j/CasΦ (Cas12j/Casphi). Non-limiting examples of Cas enzymes include Cas1, Cas1B, Cas2, Cas3, Cas4, Cas5, Cas5d, Cas5t, Cas5h, Cas5a, Cas6, Cas7, Cas8, Cas8a, Cas8b, Cas8c, Cas9 (also known as Csn1 or Csx12), Cas10, Cas10d, Cas12a/Cpfl, Cas12b/C2cl, Cas12c/C2c3, Cas12d/CasY, Cas12e/CasX, Cas12g, Cas12h, Cas12i, Cas12j/CasΦ, Cpf1, Csy1, Csy2, Csy3, Csy4, Cse1, Cse2, Cse3, Cse4, Cse5e, Csc1, Csc2, Csa5, Csn1, Csn2, Csm1, Csm2, Csm3, Csm4, Csm5, Csm6, Cmr1, Cmr3, Cmr4, Cmr5, Cmr6, Csb1, Csb2, Csb3, Csx17, Csx14, Csx10, Csx16, CsaX, Csx3, Csx1, Csx1S, Csx11, Csf1, Csf2, CsO, Csf4, Csd1, Csd2, Cst1, Cst2, Csh1, Csh2, Csa1, Csa2, Csa3, Csa4, Csa5, Type II Cas effector proteins, Type V Cas effector proteins, Type VI Cas effector proteins, CARF, DinG, homologues thereof, or modified or engineered versions thereof. Other nucleic acid programmable DNA binding proteins are also within the scope of this disclosure, although they may not be specifically listed in this disclosure. See, e.g., Makarova et al. “Classification and Nomenclature of CRISPR-Cas Systems: Where from Here?” CRISPR J. 2018 October; 1:325-336. doi: 10.1089/crispr.2018.0033; Yan et al., “Functionally diverse type V CRISPR-Cas systems” Science. 2019 Jan. 4; 363(6422):88-91. doi: 10.1126/science.aav7271, the entire contents of each are hereby incorporated by reference. Exemplary nucleic acid programmable DNA binding proteins and nucleic acid sequences encoding nucleic acid programmable DNA binding proteins are provided in the Sequence Listing as SEQ ID NOs: 197-245, 254-260, and 378.

[0120] The terms “nucleobase editing domain” or “nucleobase editing protein,” as used herein, refers to a protein or enzyme that can catalyze a nucleobase modification in RNA or DNA, such as cytosine (or cytidine) to uracil (or uridine) or thymine (or thymidine), and adenine (or adenosine) to hypoxanthine (or inosine) deaminations, as well as non-templated nucleotide additions and insertions. In some embodiments, the nucleobase editing domain is a deaminase domain (e.g., an adenine deaminase or an adenosine deaminase; or a cytidine deaminase or a cytosine deaminase).

[0121] As used herein, “obtaining” as in “obtaining an agent” includes synthesizing, purchasing, or otherwise acquiring the agent.

[0122] By “subject” or “patient” is meant a mammal, including, but not limited to, a human or non-human mammal. In embodiments, the mammal is a bovine, equine, canine, ovine, rabbit, rodent, nonhuman primate, or feline. In an embodiment, “patient” refers to a mammalian subject with a higher than average likelihood of developing a disease or a disorder. Exemplary patients can be humans, non-human primates, cats, dogs, pigs, cattle, cats, horses, camels, llamas, goats, sheep, rodents (e.g., mice, rabbits, rats, or guinea pigs) and other mammalians that can benefit from the therapies disclosed herein. Exemplary human patients can be male and/or female.

[0123] “Patient in need thereof” or “subject in need thereof” is referred to herein as a patient diagnosed with, at risk or having, predetermined to have, or suspected of having a disease or disorder.

[0124] The terms “pathogenic mutation”, “pathogenic variant”, “disease causing mutation”, “disease causing variant”, “deleterious mutation”, or “predisposing mutation” refers to a genetic alteration or mutation that is associated with a disease or disorder or that increases an individual's susceptibility or predisposition to a certain disease or disorder. In some embodiments, the pathogenic mutation comprises at least one wild-type amino acid substituted by at least one pathogenic amino acid in a protein encoded by a gene. In some embodiments, the pathogenic mutation is in a terminating region (e.g., stop codon). In some embodiments, the pathogenic mutation is in a non-coding region (e.g., intron, promoter, etc.).

[0125] By “Pongo pygmaeus (Orangutan) APOBEC (ppAPOBEC) polypeptide” is meant a cytidine deaminase polypeptide with at least about 85% amino acid sequence identity to the exemplary ppAPOBEC polypeptide sequence provided below, or a fragment thereof having cytidine deaminase activity.

Exemplary ppAPOBEC Polypeptide Sequence:

(SEQ ID NO: 941)
MTSEKGPSTGDPTLRRRIESWEFDVFYDPRELRKETCLLYEIKWGMSRK
IWRSSGKNTTNHVEVNFIKKFTSERRFHSSISCSITWFLSWSPCWECSQ
AIREFLSQHPGVTLVIYVARLFWHMDQRNRQGLRDLVNSGVTIQIMRAS
EYYHCWRNFVNYPPGDEAHWPQYPPLWMMLYALELHCIILSLPPCLKIS
RRWQNHLAFFRLHLQNCHYQTIPPHILLATGLIHPSVTWR.

[0126] By “Pongo pygmaeus (Orangutan) APOBEC (ppAPOBEC) polynucleotide” is meant a nucleic acid molecule encoding an ppAPOBEC polypeptide, as well as the introns, exons, 3′ untranslated regions, 5′ untranslated regions, and regulatory sequences associated with its expression, or fragments thereof. In embodiments, an ppAPOBEC polynucleotide is the genomic sequence, cDNA, mRNA, or gene associated with and/or required for ppAPOBEC expression. An exemplary ppAPOBEC nucleotide sequence is provided below.

Exemplary ppAPOBEC Polynucleotide Sequence:

(SEQ ID NO: 942)
ATGACCTCTGAGAAGGGCCCTAGCACAGGCGACCCCACCCTGCGGCGGA
GAATCGAGAGCTGGGAGTTCGACGTGTTCTACGACCCTAGAGAACTGAG
AAAGGAAACCTGCCTGCTGTACGAGATCAAGTGGGGCATGAGCAGAAAG
ATCTGGCGGAGCTCTGGCAAGAACACCACCAACCACGTGGAAGTGAATT
TCATCAAGAAGTTCACCAGCGAGAGAAGGTTCCACAGCAGCATCAGCTG
CAGCATCACCTGGTTCCTGAGCTGGTCCCCTTGCTGGGAATGCAGCCAG
GCCATCAGAGAGTTCCTGAGCCAACACCCCGGAGTGACACTGGTGATCT
ACGTGGCCAGACTGTTCTGGCACATGGACCAGAGAAACAGACAGGGCCT
GAGAGATCTGGTCAACAGCGGCGTGACTATCCAGATCATGCGGGCCAGC
GAGTACTACCACTGTTGGCGGAACTTCGTGAACTACCCCCCCGGCGATG
AGGCCCACTGGCCTCAGTACCCTCCTCTGTGGATGATGCTGTACGCCCT
GGAACTGCACTGCATCATCCTGTCTCTGCCTCCATGTCTGAAGATCTCT
AGAAGATGGCAGAACCACCTGGCCTTCTTCAGACTGCACCTGCAGAATT
GCCACTACCAGACCATCCCCCCCCACATCCTGCTGGCTACAGGCCTGAT
CCACCCTTCTGTGACCTGGAGA.

[0127] The terms “protein”, “peptide”, “polypeptide”, and their grammatical equivalents are used interchangeably herein, and refer to a polymer of amino acid residues linked together by peptide (amide) bonds. A protein, peptide, or polypeptide can be naturally occurring, recombinant, or synthetic, or any combination thereof.

[0128] The term “fusion protein” as used herein refers to a hybrid polypeptide which comprises protein domains from at least two different proteins.

[0129] The term “recombinant” as used herein in the context of proteins or nucleic acids refers to proteins or nucleic acids that do not occur in nature, but are the product of human engineering. For example, in some embodiments, a recombinant protein or nucleic acid molecule comprises an amino acid or nucleotide sequence that comprises at least one, at least two, at least three, at least four, at least five, at least six, or at least seven mutations as compared to any naturally occurring sequence.

[0130] By “reduces” is meant a negative alteration of at least 10%, 25%, 50%, 75%, or 100%.

[0131] By “reference” is meant a standard or control condition. In one embodiment, the reference is a wild-type or healthy cell. In other embodiments and without limitation, a reference is an untreated cell that is not subjected to a test condition, or is subjected to placebo or normal saline, medium, buffer, and/or a control vector that does not harbor a polynucleotide of interest. In embodiments, a reference is a healthy subject or cell without inappropriate activation of the complement system. In some cases, a reference is an unedited or untreated cell (e.g., a hepatocyte), tissue (e.g., component of the central nervous system or an organ, such as a liver, eye) and/or subject.

[0132] A “reference sequence” is a defined sequence used as a basis for sequence comparison. A reference sequence may be a subset of or the entirety of a specified sequence; for example, a segment of a full-length cDNA or gene sequence, or the complete cDNA or gene sequence. For polypeptides, the length of the reference polypeptide sequence will generally be at least about 16 amino acids, at least about 20 amino acids, at least about 25 amino acids, about 35 amino acids, about 50 amino acids, or about 100 amino acids. For nucleic acids, the length of the reference nucleic acid sequence will generally be at least about 50 nucleotides, at least about 60 nucleotides, at least about 75 nucleotides, about 100 nucleotides or about 300 nucleotides or any integer thereabout or therebetween. In some embodiments, a reference sequence is a wild-type sequence of a protein of interest. In other embodiments, a reference sequence is a polynucleotide sequence encoding a wild-type protein.

[0133] The term “RNA-programmable nuclease,” and “RNA-guided nuclease” refer to a nuclease that forms a complex with (e.g., binds or associates with) one or more RNA(s) that is not a target for cleavage. In some embodiments, an RNA-programmable nuclease, when in a complex with an RNA, may be referred to as a nuclease-RNA complex. Typically, the bound RNA(s) is referred to as a guide RNA (gRNA). In some embodiments, the RNA-programmable nuclease is the (CRISPR-associated system) Cas9 endonuclease, for example, Cas9 (Csnl) from Streptococcus pyogenes (e.g., SEQ ID NO: 197), Cas9 from Neisseria meningitidis (NmeCas9; SEQ ID NO: 208), Nme2Cas9 (SEQ ID NO: 209), Streptococcus constellatus (ScoCas9), or derivatives thereof (e.g., a sequence with at least about 85% sequence identity to a Cas9, such as Nme2Cas9 or spCas9).

[0134] Amino acids generally can be grouped into classes according to the following common side-chain properties:
[0135] (1) hydrophobic: Norleucine, Met, Ala, Val, Leu, He;
[0136] (2) neutral hydrophilic: Cys, Ser, Thr, Asn, Gin;
[0137] (3) acidic: Asp, Glu;
[0138] (4) basic: His, Lys, Arg;
[0139] (5) residues that influence chain orientation: Gly, Pro;
[0140] (6) aromatic: Trp, Tyr, Phe.

[0141] In some embodiments, conservative substitutions can involve the exchange of a member of one of these classes for another member of the same class. In some embodiments, non-conservative amino acid substitutions can involve exchanging a member of one of these classes for another class.

[0142] The term “single nucleotide polymorphism (SNP)” is a variation in a single nucleotide that occurs at a specific position in the genome, where each variation is present to some appreciable degree within a population (e.g., >1%). SNPs can fall within coding regions of genes, non-coding regions of genes, or in the intergenic regions (regions between genes). In some embodiments, SNPs within a coding sequence do not necessarily change the amino acid sequence of the protein that is produced, due to degeneracy of the genetic code. SNPs in the coding region are of two types: synonymous and nonsynonymous SNPs. Synonymous SNPs do not affect the protein sequence, while nonsynonymous SNPs change the amino acid sequence of protein. The nonsynonymous SNPs are of two types: missense and nonsense. SNPs that are not in protein-coding regions can still affect gene splicing, transcription factor binding, messenger RNA degradation, or the sequence of noncoding RNA. Gene expression affected by this type of SNP is referred to as an eSNP (expression SNP) and can be upstream or downstream from the gene. A single nucleotide variant (SNV) is a variation in a single nucleotide without any limitations of frequency and can arise in somatic cells. A somatic single nucleotide variation can also be called a single-nucleotide alteration.

[0143] By “specifically binds” is meant a nucleic acid molecule, polypeptide, polypeptide/polynucleotide complex, compound, or molecule that recognizes and binds a polypeptide and/or nucleic acid molecule of the disclosure, but which does not substantially recognize and bind other molecules in a sample, for example, a biological sample.

[0144] By “substantially identical” is meant a polypeptide or nucleic acid molecule exhibiting at least 50% identity to a reference amino acid sequence. In one embodiment, a reference sequence is a wild-type amino acid or nucleic acid sequence. In another embodiment, a reference sequence is any one of the amino acid or nucleic acid sequences described herein. In one embodiment, such a sequence is at least about 60%, 80%, 85%, 90%, 95%, 96%, 97%, 98%, 99%, 99.9%, or even 99.99%, identical at the amino acid level or nucleic acid level to the sequence used for comparison.

[0145] Sequence identity is typically measured using sequence analysis software (for example, Sequence Analysis Software Package of the Genetics Computer Group, University of Wisconsin Biotechnology Center, 1710 University Avenue, Madison, Wis. 53705, BLAST, BESTFIT, GAP, or PILEUP/PRETTYBOX programs). Such software matches identical or similar sequences by assigning degrees of homology to various substitutions, deletions, and/or other modifications. Conservative substitutions typically include substitutions within the following groups: glycine, alanine; valine, isoleucine, leucine; aspartic acid, glutamic acid, asparagine, glutamine; serine, threonine; lysine, arginine; and phenylalanine, tyrosine.

[0146] Nucleic acid molecules useful in the methods of the disclosure include any nucleic acid molecule that encodes a polypeptide of the disclosure or a functional fragment thereof. Such nucleic acid molecules need not be 100% identical with an endogenous nucleic acid sequence, but will typically exhibit substantial identity. Polynucleotides having “substantial identity” to an endogenous sequence are typically capable of hybridizing with at least one strand of a double-stranded nucleic acid molecule. Nucleic acid molecules useful in the methods of the disclosure include any nucleic acid molecule that encodes a polypeptide of the disclosure or a functional fragment thereof. Such nucleic acid molecules need not be 100% identical with an endogenous nucleic acid sequence, but will typically exhibit substantial identity. Polynucleotides having “substantial identity” to an endogenous sequence are typically capable of hybridizing with at least one strand of a double-stranded nucleic acid molecule. By “hybridize” is meant pair to form a double-stranded molecule between complementary polynucleotide sequences (e.g., a gene described herein), or portions thereof, under various conditions of stringency. (See, e.g., Wahl, G. M. and S. L. Berger (1987) Methods Enzymol. 152:399; Kimmel, A. R. (1987) Methods Enzymol. 152:507).

[0147] By “split” is meant divided into two or more fragments.

[0148] A “split polypeptide” or “split protein” refers to a protein that is provided as an N-terminal fragment and a C-terminal fragment translated as two separate polypeptides from a nucleotide sequence(s). The polypeptides corresponding to the N-terminal portion and the C-terminal portion of the split protein may be spliced in some embodiments to form a “reconstituted” protein. In embodiments, the split polypeptide is a nucleic acid programmable DNA binding protein (e.g., a Cas9) or a base editor.

[0149] The term “target site” refers to a sequence within a nucleic acid molecule that is modified. In embodiments, the modification is deamination of a base. The deaminase can be a cytidine or an adenine deaminase. The fusion protein or base editing complex comprising a deaminase may comprise a dCas9-adenosine deaminase fusion protein, a Cas12b-adenosine deaminase fusion, or a base editor disclosed herein.

[0150] As used herein, the terms “treat,” treating,” “treatment,” and the like refer to reducing or ameliorating a disorder and/or symptoms associated therewith or obtaining a desired pharmacologic and/or physiologic effect. It will be appreciated that, although not precluded, treating a disorder or condition does not require that the disorder, condition or symptoms associated therewith be completely eliminated. In some embodiments, the effect is therapeutic, i.e., without limitation, the effect partially or completely reduces, diminishes, abrogates, abates, alleviates, decreases the intensity of, or cures a disease and/or adverse symptom attributable to the disease. In some embodiments, the effect is preventative, i.e., the effect protects or prevents an occurrence or reoccurrence of a disease or condition. To this end, the presently disclosed methods comprise administering a therapeutically effective amount of a composition as described herein.

[0151] By “uracil glycosylase inhibitor” or “UGI” is meant an agent that inhibits the uracil-excision repair system. Base editors comprising a cytidine deaminase convert cytosine to uracil, which is then converted to thymine through DNA replication or repair. In various embodiments, a uracil DNA glycosylase (UGI) prevent base excision repair which changes the U back to a C. In some instances, contacting a cell and/or polynucleotide with a UGI and a base editor prevents base excision repair which changes the U back to a C. An exemplary UGI comprises an amino acid sequence as follows:

>splP14739IUNGI_BPPB2 Uracil-DNA Glycosylase Inhibitor

(SEQ ID NO: 231)
MTNLSDIIEKETGKQLVIQESILMLPEEVEEVIGNKPESDILVHTAYDE
STDENVMLLTSDAPEYKPWALVIQDSNGENKIKML.

[0152] In some embodiments, the agent inhibiting the uracil-excision repair system is a uracil stabilizing protein (USP). See, e.g., WO 2022015969 A1, incorporated herein by reference.

[0153] Ranges provided herein are understood to be shorthand for all of the values within the range. For example, a range of 1 to 50 is understood to include any number, combination of numbers, or sub-range from the group consisting 1, 2, 3, 4, 5, 6, 7, 8, 9, 10, 11, 12, 13, 14, 15, 16, 17, 18, 19, 20, 21, 22, 23, 24, 25, 26, 27, 28, 29, 30, 31, 32, 33, 34, 35, 36, 37, 38, 39, 40, 41, 42, 43, 44, 45, 46, 47, 48, 49, or 50.

[0154] As used herein, the term “vector” refers to a means of introducing a nucleic acid molecule into a cell, resulting in a transformed cell. Vectors include plasmids, transposons, phages, viruses, liposomes, lipid nanoparticles, and episomes.

[0155] The recitation of a listing of chemical groups in any definition of a variable herein includes definitions of that variable as any single group or combination of listed groups. The recitation of an embodiment for a variable or aspect herein includes that embodiment as any single embodiment or in combination with any other embodiments or portions thereof.

[0156] All terms are intended to be understood as they would be understood by a person skilled in the art. Unless defined otherwise, all technical and scientific terms used herein have the same meaning as commonly understood by one of ordinary skill in the art to which the disclosure pertains

[0157] In this application, the use of the singular includes the plural unless specifically stated otherwise. It must be noted that, as used in the specification, the singular forms “a,” “an” and “the” include plural referents unless the context clearly dictates otherwise. In this application, the use of “or” means “and/or” unless stated otherwise. Furthermore, use of the term “including” as well as other forms, such as “include”, “includes,” and “included,” is not limiting.

[0158] As used in this specification and claim(s), the words “comprising” (and any form of comprising, such as “comprise” and “comprises”), “having” (and any form of having, such as “have” and “has”), “including” (and any form of including, such as “includes” and “include”) or “containing” (and any form of containing, such as “contains” and “contain”) are inclusive or open-ended. This wording indicates that specified elements, features, components, and/or method steps are present, but does not exclude the presence of other elements, features, components, and/or method steps. Any embodiments specified as “comprising” a particular component(s) or element(s) are also contemplated as “consisting of” or “consisting essentially of” the particular component(s) or element(s) in some embodiments. It is contemplated that any embodiment discussed in this specification can be implemented with respect to any method or composition of the present disclosure, and vice versa. Furthermore, compositions of the present disclosure can be used to achieve methods of the present disclosure.

[0159] The term “about” or “approximately” means within an acceptable error range for the particular value as determined by one of ordinary skill in the art, which will depend in part on how the value is measured or determined, i.e., the limitations of the measurement system.

[0160] Reference in the specification to “some embodiments,” “an embodiment,” “one embodiment” or “other embodiments” means that a particular feature, structure, or characteristic described in connection with the embodiments is included in at least some embodiments, but not necessarily all embodiments, of the present disclosures.

### BRIEF DESCRIPTION OF THE DRAWINGS

[0161] FIG. 1 provides a bar graph showing A>G base editing rates at the associated target site knock-out for the indicated guides for complement component 3 (C3) screened with the indicated ABE8.8 base editors. The dashed line indicates editing rates of 40%.

[0162] FIG. 2 provides a bar graph showing C>T base editing rates at the associated target site for the indicated guides for complement component 3 (C3) screened with the indicated BE4 base editors. The dashed line indicates editing rates of 50%.

[0163] FIG. 3 provides a bar graph showing human C3 protein concentrations measured by ELISA in PXB-cell hepatocyte supernatants 2 days prior to transfection. Each condition was run in triplicate, as represented by each dot in the graph. The bars show the mean C3 protein concentrations, and the error bars indicate standard deviations.

[0164] FIG. 4 provides a bar graph showing human C3 protein concentrations measured by ELISA in PXB-cell hepatocyte supernatants 7 days post-transfection. Each condition was run in triplicate, as represented by each dot in the graph. The bars show the mean C3 protein concentrations, and error bars indicate standard deviations.

[0165] FIG. 5 provides an overlayed bar graph and plot showing editing rates in PXB-cell hepatocytes at target sites assessed at 16 days post-transfection by next-generation DNA sequencing (NGS) (squares, right axis), and human C3 protein concentrations assessed 13 days post-transfection by ELISA (bars, left axis). Each condition was run in triplicate, as represented by each dot in the graph. The dashed line indicates the average human C3 protein concentration for cells contacted with sgRNA_088_ABE8.8_SpCas9.

[0166] FIG. 6 provides an overlayed bar graph and plot showing editing rates in PXB-cell hepatocytes at targeted sites assessed at 16 days post-transfection by NGS (squares, right axis), and human C3 protein concentrations assessed 16 days post-transfection by ELISA (bars, left axis). Each condition was run in triplicate, as represented by each dot in the graph. The dashed line indicates the average human C3 protein concentration for cells contacted with sgRNA_088_ABE8.8_SpCas9.

[0167] FIG. 7 provides a bar graph showing A>G base editing rates at the associated target sites for the indicated complement component 3 (C3) knock-out (KO) guides screened with 5 ABE8 deaminase variants. Deaminase variants were tested in three separate experiments, which are separated from one another by two gaps in the bar graph. The positive control sgRNA_088_ABE8.8_SpCas9 condition was included for each editing experiment. In FIG. 7, each grouping of five bars corresponds from left-to-right to ABE8.8, ABE8.17, ABE8.13, ABE8.20, and ABE8.20_V82T, respectively.

[0168] FIG. 8 provides a bar graph showing A>G base editing rates at the associated target sites for the indicated C3 KO guides with varying spacer lengths. The standard spacer length for all guides is 20 bp. Guides were tested in two separate experiments, which are separated from one another by a gap in the bar graph. The positive control sgRNA_088_ABE8.8_SpCas9 condition was included for each editing experiment. The gRNA676 and gRNA696 spacer length series was ordered from Synthego, and the remaining spacer length series and positive control was ordered from IDT. sgRNA_088 had a standard spacer length, which was 20 bp and was ordered from IDT. In FIG. 8, each grouping of five bars corresponds form left-to-right to 20 bp, 21 bp, 22 bp, 23 bp, and 19 bp, respectively.

[0169] FIG. 9 provides a bar graph showing human complement component 3 (C3) protein concentrations measured by ELISA in PXB-cell hepatocyte supernatants just prior to transfection. Each condition was run in triplicate. Conditions transfected with 800 ng total RNA are denoted with dots and conditions transfected with 1200 ng total RNA are denoted with squares. Bars indicate the mean C3 protein concentrations, and error bars indicate standard deviation.

[0170] FIG. 10 provides an overlayed bar graph and plot showing editing rates in PXB-cell hepatocytes at target sites assessed 13 days post-transfection by NGS (diamonds, right axis), and human C3 protein concentrations assessed 13 days post-transfection by ELISA (bars plots, left axis). Each condition was run in triplicate, as represented by each dot in the graph. The dashed line indicates the average human C3 protein concentration for cells contacted with sgRNA_088_ABE8.8_SpCas9 at a 1200 ng transfection dose. In FIG. 10, lone bars correspond to 800 ng. For the pairs of bars shown in FIG. 10, the left bar corresponds to 800 ng and the right bar corresponds to 1200 ng.

[0171] FIG. 11 provides a bar graph showing human C3 protein concentrations measured by ELISA in PHH co-culture supernatants just prior to transfection. Each condition was run in triplicate. Conditions involving transfection with 800 ng total RNA are denoted with dots and condition involving transfection with 1200 ng total RNA are denoted with squares. Bars indicate the mean C3 protein concentrations, and error bars indicate standard deviation.

[0172] FIG. 12 provides an overlayed bar graph and plot showing editing rates in primary human hepatocyte (PHH) co-cultures at the targeted site assessed 13 days post-transfection by NGS (diamonds, right axis), and human C3 protein concentrations assessed 13 days post-transfection by ELISA (bars, left axis). Each condition was run in duplicate or triplicate, as represented by each dot in the graph. The dashed line indicates the average human C3 concentration for cells contacted with sgRNA_088_ABE8.8_SpCas9 at a 1200 ng transfection dose. In FIG. 12, lone bars correspond to 800 ng. For the pairs of bars shown in FIG. 12, the left bar corresponds to 800 ng and the right bar corresponds to 1200 ng.

[0173] FIG. 13 provides a bar graph showing target A>G base-editing rates in primary cyno hepatocyte (PCH) monolayers at the targeted site assessed 3 days post-transfection by next-generation DNA sequencing (NGS). Each condition was run in triplicate, as represented by each dot in the graph. Error bars indicate the standard deviation.

[0174] FIG. 14 provides a bar graph showing cyno C3 protein concentrations measured by ELISA in primary cyno hepatocyte co-culture supernatants prior to transfection. Each condition was run in triplicate, as represented by each dot in the graph. Bars show the mean C3 protein concentrations, and error bars indicate standard deviation.

[0175] FIG. 15 provides an overlayed bar graph and plot showing editing rates in primary cyno hepatocyte co-cultures at target sites assessed at 13 days post-transfection by NGS (squares, right axis), and cyno C3 protein concentrations assessed 7 days post-transfection by ELISA (bars, left axis). Each condition was run in triplicate, as represented by each dot in the graph. The dashed line indicates the average cyno C3 concentration for cells contacted with sgRNA_088_ABE8.8_SpCas9.

[0176] FIG. 16 provides an overlayed bar graph and plot showing editing rates in primary cyno hepatocyte co-cultures at target sites assessed at 13 days post-transfection by NGS (squares, right axis), and cyno C3 protein concentrations assessed 13 days post-transfection by ELISA (bars, left axis). Each condition was run in triplicate, as represented by each dot in the graph. The dashed line indicates the average cyno C3 concentration for cells contacted with sgRNA_088_ABE8.8_SpCas9.

[0177] FIG. 17 provides a bar graph showing base editing rates for C3 guides designed to disrupt opsonization. On-target base editing rates are in black and indicate the editing efficiency at the site of interest, indicated below the sample names. Bystander editing rates are in grey and indicate the max editing rate detected within the protospacer region at sites other than the one indicated below the sample names.

[0178] FIG. 18 provides a bar graph showing base editing rates for C3 guides designed to disrupt C3 cleavage by C3 convertases. Mutation #1, in black, indicates editing efficiency at the first mutated residue for that guide, see ‘Mutated Residue(s)’ column in Table 2. Mutation #2, in grey, indicates the editing efficiency at the second mutated residue for that guide, see ‘Mutated Residue(s)’ column in Table 2.

[0179] FIG. 19 provides a depiction of the chemical structure of pegacetacoplan (“APL2”), assuming n is between about 800 and 1100 and a polyethylene glycol (PEG) of about 40 kD. The two amino acid sequences depicted in the chemical structure of FIG. 19 each correspond to SEQ ID NO: 854.

[0180] FIG. 20 provides a bar graph showing target A>G % base editing and human C3 protein concentrations at day 14 post-transfection (normalized to concentrations at day zero (0)) in FRG liver-humanized mice administered the indicated base editor systems at the indicated total combined doses of guide polynucleotide RNA and mRNA encoding the base editor. Each shaded bar of FIG. 20 corresponds to an hC3 protein concentration measurement and each set of data points to the left of each bar (the mean value thereof being indicated by a horizontal line) corresponds to target base editing measurements.

[0181] FIG. 21 provides a bar graph showing C3 RNA levels normalized to GAPDH RNA levels in FRG liver-humanized mice administered the indicated base editor systems at the indicated total combined doses of guide polynucleotide RNA and mRNA encoding the base editor. Each set of three bars in FIG. 21 correspond to, from left-to-right, levels of mRNA detected using a probe spanning Exon 4-5 (first set of 3 bars), Exon 19-20 (2^{nd} set of 3 bars), Exon 27-38 (3^{rd} set of 3 bars), and Exon 38-39 (4^{th} set of 3 bars).

[0182] FIG. 22 provides a bar graph showing target A>G % base editing and human C3 protein concentrations at day 14 post-transfection (normalized to concentrations at day zero (0)) in FRG liver-humanized mice administered the indicated base editor systems. Each shaded bar of FIG. 22 corresponds to an hC3 protein concentration measurement and each set of data points to the left of each bar (the mean value thereof being indicated by a horizontal line) corresponds to target base editing measurements.

[0183] FIG. 23 provides a plot showing target A>G base-editing in primary human hepatocytes (PHH) and primary cyno hepatocytes (PCH) at the indicated doses of the indicated base editor systems, where “base-editing dose” indicates the combined mass of the guide polynucleotide and mRNA encoding the base editor administered.

[0184] FIG. 24 provides a plot showing maximum A>G base-editing in HEK293T cells administered the indicated base editor systems using the indicated dose of the guide polynucleotide (gRNA).

[0185] FIG. 25 provides a bar graph showing target A>G base editing (%) in primary human hepatocyte (PHH) monolayers administered the indicated base editor systems at a dose (i.e., total combined mase of the guide polynucleotide and the mRNA encoding the base editor) of 2.5 ng or 10 ng. The left set of bars correspond to a dose of 2.5 ng and the right set of bars correspond to a dose of 10 ng.

[0186] FIG. 26 provides a bar graph showing target A>G base editing (%) in primary human hepatocyte (PHH) monolayers administered the indicated base editor systems at a dose (i.e., total combined mase of the guide polynucleotide and the mRNA encoding the base editor) of ng.

[0187] FIG. 27 provides a bar graph showing target A>G base editing (%) in primary human hepatocyte (PHH) monolayers administered the indicated base editor systems at a dose (i.e., total combined mase of the guide polynucleotide and the mRNA encoding the base editor) of ng.

[0188] FIG. 28 provides a bar graph showing target A>G % base editing and human C3 protein concentrations at day 14 post-transfection (normalized to concentrations at day zero (0)) in FRG liver-humanized mice administered the indicated base editor systems at the indicated total combined doses of guide polynucleotide RNA and mRNA encoding the base editor. Each shaded bar of FIG. 28 corresponds to an hC3 protein concentration measurement and each set of data points to the left of each bar (the mean value thereof being indicated by a horizontal line) corresponds to target base editing measurements.

[0189] FIG. 29 provides a bar graph showing target A>G % base editing and human C3 protein concentrations at day 14 post-transfection (normalized to concentrations at day zero (0)) in FRG liver-humanized mice administered the indicated base editor systems at the indicated total combined doses of guide polynucleotide RNA and mRNA encoding the base editor. Each shaded bar of FIG. 29 corresponds to an hC3 protein concentration measurement and each set of data points to the left of each bar (the mean value thereof being indicated by a horizontal line) corresponds to target base editing measurements.

[0190] FIG. 30 provides a bar graph showing C3 RNA levels normalized to GAPDH RNA levels in FRG liver-humanized mice administered the indicated base editor systems at the indicated doses (total combined masses of guide polynucleotide RNA and mRNA encoding the base editor). In FIG. 30, RNA levels were measured using a probe spanning Exons 4 and of C3.

[0191] FIG. 31 provides a bar graph showing provides a bar graph showing C3 RNA levels normalized to GAPDH RNA levels in FRG liver-humanized mice administered the indicated base editor systems at the indicated doses (total combined masses of guide polynucleotide RNA and mRNA encoding the base editor). In FIG. 31, RNA levels were measured using a probe spanning Exons 19 and 20 of C3.

[0192] FIG. 32 provides a bar graph showing provides a bar graph showing C3 RNA levels normalized to GAPDH RNA levels in FRG liver-humanized mice administered the indicated base editor systems at the indicated doses (total combined masses of guide polynucleotide RNA and mRNA encoding the base editor). In FIG. 32, RNA levels were measured using a probe spanning Exons 27 and 28 of C3.

[0193] FIG. 33 provides a bar graph showing provides a bar graph showing C3 RNA levels normalized to GAPDH RNA levels in FRG liver-humanized mice administered the indicated base editor systems at the indicated doses (total combined masses of guide polynucleotide RNA and mRNA encoding the base editor). In FIG. 33, RNA levels were measured using a probe spanning Exons 38 and 39 of C3.

[0194] FIG. 34 provides a bar graph showing target A>G base-editing (%) in Hek293T cells for the indicated base editors.

[0195] FIG. 35 provides a bar graph showing target A>G base-editing (%) in Hek293T cells for the indicated base editors. The numbers listed beneath each set of bars represent, in order from left-to-right, the respective locations of the target nucleotide upstream of the C3 start codon to which each bar corresponds.

[0196] FIG. 36 provides a bar graph showing human C3 protein concentrations in PHH cells administered the indicated base editors.

[0197] FIG. 37 provides a bar graph showing editing rates (%) and human C3 protein concentrations for primary human hepatocyte (PHH) co-cultures administered the indicated base editor systems targeting the C3 start codon or TATA-box for base editing, as indicated. In FIG. 37, the light grey bars correspond to human C3 (hC3) protein concentrations, and the dark grey bars corresponding to editing rates.

[0198] FIG. 38 provides a bar graph showing on-target A>G base-editing (%) for PHH monolayers administered the indicated base editor systems.

[0199] FIG. 39 provides a bar graph showing negligible variability between PHH co-cultures administered the indicated base editors prior to transfection with the base editors.

[0200] FIG. 40 provides a bar graph showing editing rates (%) and hC3 concentrations for PHH co-cultures administered the indicated base editor systems, where light grey bars indicate protein concentrations and the dark grey bars indicate editing rates.

[0201] FIG. 41 provides a plot showing target A>G base editing (%) in HepG2 cells administered the indicated base editors at the indicated base-editing doses (i.e., combined mass of the guide polynucleotide and the mRNA encoding the base editor).

### DETAILED DESCRIPTION

[0202] Provided herein are base editors, endonucleases, and guide RNAs (gRNAs) for use in editing, modifying, or altering a target polynucleotide. In particular embodiments, a base editor or endonuclease of the present disclosure modifies a complement component 3 (C3) polynucleotide. In particular embodiments, a base editor of the disclosure introduces a stop codon, missense mutation, or indel (e.g., a 1, 2, 3, 4, 5, 6, 7, 8, 9, or 10-nucleotide acid insertion or deletion (indel)) alteration in an C3 polynucleotide or disrupts a splice site in the C3 polynucleotide. The alterations are associated with a reduction in activity or levels of a C3 polypeptide and/or polynucleotide in a cell.

[0203] The invention of the disclosure is based, at least in part, on the discovery that the complement system can be activated through a number of distinct pathways and that each of these pathways requires the protein C3 for complement pathway amplification and function. The invention is further based, at least in part, upon the discovery that base editing (e.g., disruption of splice acceptor or splice donor, or introduction of a stop codon, missense mutation, or indel alteration) can be used to reduce the expression of a C3 polypeptide in a cell associated with a dysregulated complement system (e.g., inappropriate activation). In particular, reducing activity and/or expression of the C3 polypeptide in a subject diagnosed with a disease or disorder associated with over-activation of the complement system can be an effective treatment strategy. This reduction in activity and/or expression can be effected using any of the base editing systems and/or endonucleases and methods provided herein. Accordingly, the disclosure features compositions and methods for editing a C3 polynucleotide. The edit to the C3 polynucleotide is associated with a reduction in expression and/or activity of a C3 polypeptide in a cell, tissue, and/or body fluid of a subject, as well as in symptoms associated with overactivation or otherwise pathogenic activation of the complement system in a subject.

[0204] Accordingly, as described in the examples provided herein base editor systems were successfully developed to disrupt complement system activity through functional disruption of C3 at the gene level. C3 disruption was carried out using two separate approaches: 1) silencing of the C3 gene and 2) generation of mutations that disrupted specific C3 functions (e.g., opsonization or cleavage by C3 convertases).

[0205] In embodiments, the methods of the present disclosure include disrupting splicing of a C3 polynucleotide transcript. For example, the base editors or base editor systems provided herein can be used for editing a nucleobase in the splice acceptor situated 5′ of an exon of the C3 polynucleotide. In some embodiments, the target sequence is a splice acceptor in the intron of an intron sequence adjacent to an exon of the C3 polynucleotide and is associated with a change in the splice acceptor compared to a wild-type splice acceptor. In some embodiments, the deamination of an A or C nucleobase in the splice acceptor results in disruption of splicing of the mRNA transcript during or after transcription. In some embodiments, the subject has or has the potential to develop a dysregulated and/or over-activated complement system and any disease or disorder associated therewith.

[0206] In some instances, the methods of the present disclosure include modifying the C3 polynucleotide to introduce an amino acid alteration in a C3 polypeptide encoded thereby. In embodiments, the amino acid alteration disrupts cleavage of the C3 polypeptide by a C3 convertase to yield a C3b fragment. In embodiments, the C3 convertase cleaves the C3 polypeptide between residues R748 and S749. In some cases, the amino acid alteration disrupts opsonization. In embodiments, the amino acid alteration disrupts opsonization by the C3b fragment. In embodiments, the altered amino acid is at position C1010, Q1013, E1128, and/or H1126. In some cases, the altered amino acid is R748.

[0207] In some instances, the methods of the present disclosure include modifying a C3 polynucleotide to introduce a stop codon, indel, or missense mutation associated with a reduction in levels or activity of the C3 polynucleotide and/or polypeptide. The alterations can be effected by a base editor system or by an endonuclease (e.g., a Cas9), such as those described herein.

[0208] In some embodiments, the present disclosure provides base editors or nucleases that efficiently generate an intended mutation, such as a point mutation or indel, in a nucleic acid molecule (e.g., a nucleic acid within a genome of a subject) without generating a significant number of unintended mutations, such as unintended point mutations. In some embodiments, an intended mutation is a mutation that is generated by a specific base editor (e.g., an adenosine base editor or a cytidine base editor) or endonuclease (e.g., Cas9) bound to a guide polynucleotide (e.g., gRNA), specifically designed to generate the intended mutation. In some embodiments, the intended mutation is an adenine (A) to guanine (G) point mutation within the non-coding region of a gene. In some embodiments, the intended mutation is a cytosine (C) to thymine (T) point mutation within the non-coding region of a gene. In some embodiments, the intended mutation is a mutation of a splice acceptor in the non-coding region 5′ of an exon of a gene associated with a disease or disorder. In some instances, the intended mutation is an indel mutation. In some embodiments, the intended mutation is an adenine (A) to guanine (G) point mutation in the splice acceptor in the non-coding region 5′ of an exon of a gene associated with a disease or disorder. In some embodiments, the intended mutation is a missense mutation. The intended mutation can include the introduction of a stop codon to a polynucleotide sequence. In some embodiments, the intended mutation is a mutation that disrupts normal splicing of a complete transcript of a gene, for example, an A to G change in the splice acceptor within the non-coding region located 5′ of an exon of a disease-causing or a disease-associated gene. In some embodiments, the intended mutation is a mutation in the splice acceptor that disrupts splicing of a gene transcript and results in an alternative transcript that encodes a truncated and/or nonfunctional protein product.

[0209] In some embodiments, any of the base editors or endonucleases provided herein are capable of generating a ratio of intended mutations to unintended mutations (e.g., intended point mutations:unintended point mutations) that is greater than 1:1. In some embodiments, any of the base editors provided herein are capable of generating a ratio of intended mutations to unintended mutations (e.g., intended point mutations:unintended point mutations) that is at least 1.5:1, at least 2:1, at least 2.5:1, at least 3:1, at least 3.5:1, at least 4:1, at least 4.5:1, at least 5:1, at least 5.5:1, at least 6:1, at least 6.5:1, at least 7:1, at least 7.5:1, at least 8:1, at least 10:1, at least 12:1, at least 15:1, at least 20:1, at least 25:1, at least 30:1, at least 40:1, at least 50:1, at least 100:1, at least 150:1, at least 200:1, at least 250:1, at least 500:1, or at least 1000:1, or more.

[0210] In some embodiments, editing of a plurality of nucleobase pairs in one or more genes using the methods provided herein results in formation of at least one intended mutation. In some embodiments, the formation of the at least one intended mutation is in the splice acceptor 5′ of an exon of a disease-associated gene and results in disruption of splicing of the mRNA transcript of a disease-associated gene. It should be appreciated that multiplex editing can be accomplished using any method or combination of methods provided herein.

[0211] The present disclosure provides methods for the treatment of a subject diagnosed with a dysregulated and/or over-activated complement system or any disease or disorder associated therewith. For example, in some embodiments, a method is provided that comprises administering to a subject having or having a propensity to develop a dysregulated and/or over-activated complement system, an effective amount of a nucleobase editor (e.g., an adenosine deaminase base editor or a cytidine deaminase base editor) or endonuclease to effect an alteration in a C3 polynucleotide sequence.

### The Complement System and C3

[0212] Complement is a system consisting of numerous plasma and cell-bound proteins that plays an important role in both innate and adaptive immunity. The proteins of the complement system act in a series of enzymatic cascades through a variety of protein interactions and cleavage events.

[0213] The complement system plays an important role in defending the body against infectious agents. The complement system contains over 30 serum and cellular proteins that are involved in three major pathways, known as the classical, alternative, and lectin pathways. The classical pathway is typically triggered by binding of a complex of antigen and IgM or IgG antibody to C1 (though certain other activators can also initiate the pathway). Activated C1 cleaves C4 and C2 to produce C4a and C4b, in addition to C2a and C2b. C4b and C2a combine to form C3 convertase, which cleaves C3 at a defined cleavage site to form C3a and C3b. Binding of C3b to C3 convertase produces C5 convertase, which cleaves C5 into C5a and C5b. C3a, C4a, and C5a are anaphylotoxins and mediate multiple reactions in the acute inflammatory response. C3a and C5a are also chemotactic factors that attract immune system cells such as neutrophils. Further details relating to C3 are provided in Ricklin, et al. “Complement component C3—The ‘Swiss Army Knife’ of innate immunity and host defense.” Immunol Rev. 2016 November; 274(1):33-58; and in Janssen, et al., “Structures of complement component C3 provide insights into the function and evolution of immunity.” Nature. 2005 Sep. 22; 437(7058):505-11, the disclosures of which are incorporated herein by reference in their entireties for all purposes.

[0214] The alternative pathway is typically initiated by and amplified at microbial surfaces and various complex polysaccharides. In this pathway, hydrolysis of C3 to C3 (H2O), which occurs spontaneously at a low level, leads to binding of factor B, which is cleaved by factor D, generating a fluid phase C3 convertase that activates complement by cleaving C3 into C3a and C3b. C3b binds to targets such as cell surfaces and forms a complex with factor B, which is later cleaved by factor D, resulting in a C3 convertase. Surface-bound C3 convertases cleave and activate additional C3 molecules, resulting in rapid C3b deposition in close proximity to the site of activation and leading to formation of additional C3 convertase, which in turn generates additional C3b. This process results in a cycle of C3 cleavage and C3 convertase formation that significantly amplifies the response. Cleavage of C3 and binding of another molecule of C3b to the C3 convertase gives rise to a C5 convertase. C3 and C5 convertases of this pathway are regulated by cellular molecules CR1, DAF, MCP, CD59, and fH. The mode of action of these proteins involves either decay accelerating activity (i.e., ability to dissociate convertases), ability to serve as cofactors in the degradation of C3b or C4b by factor I, or both. Normally the presence of complement regulatory proteins on cell surfaces prevents significant complement activation from occurring thereon.

[0215] The C5 convertases produced in both pathways cleave C5 to produce C5a and C5b. C5b then binds to C6, C7, and C8 to form C5b-8, which catalyzes polymerization of C9 to form the C5b-9 membrane attack complex (MAC), also known as the terminal complement complex (TCC). The MAC inserts itself into target cell membranes and causes cell lysis. Small amounts of MAC on the membrane of cells may have a variety of consequences other than cell death. If the TCC does not insert into a membrane, it can circulate in the blood as soluble sC5b-9 (sC5b-9). Levels of sC5b-9 in the blood may serve as an indicator of complement activation.

[0216] The lectin complement pathway can be initiated by binding of mannose-binding lectin (MBL) and MBL-associated serine protease (MASP) to carbohydrates. The MB1-1 gene (known as LMAN-1 in humans) encodes a type I integral membrane protein localized in the intermediate region between the endoplasmic reticulum and the Golgi. The MBL-2 gene encodes the soluble mannose-binding protein found in serum. In the human lectin pathway, MASP-1 and MASP-2 are involved in the proteolysis of C4 and C2, leading to a C3 convertase described above.

Diseases and/or Disorders Associated with Undesirably Increased Activation of the Complement System

[0217] Inappropriate activation of the complement system can lead to various diseases and/or disorders in a subject. For example, inappropriate activation of the complement system in a subject damages cells resulting in increased inflammation, the presence of autoantibodies, neural degeneration, and microthrombosis, among others. Inappropriate activation of the complement system is associated with damage to the Central Nervous System (CNS), eyes, blood cells (e.g., red and white blood cells and platelets), and transplanted organs, as well as damage to other organs or tissues, which may be associated with the presence of micro-emboli. Therefore, an effective treatment for such diseases and/or disorders can involve altering a C3 nucleotide sequence to reduce and/or eliminate expression and/or activity of a C3 polypeptide in a subject, thereby reducing activation of the complement system in an organ, cell, and/or tissue. In embodiments, the organ or tissue is an eye, kidney, central nervous system component, heart, or thyroid.

[0218] Non-limiting examples of diseases associated inappropriate activation of the complement system include blood disorders, transplant or graft rejection, inflammatory diseases or disorders, eye diseases or disorders, kidney diseases or disorders, heart disorders, respiratory/pulmonary diseases or disorders, autoimmune disorders, inflammatory bowel diseases or disorders, arthritis, neurodegenerative diseases or disorders, musculoskeletal diseases or disorders associated with inflammation, disorders affecting the integumentary system, diseases or disorders affecting the central nervous system, diseases or disorders affecting the circulatory system, diseases or disorders affecting the gastrointestinal system, diseases or disorders affecting the thyroid, chronic pain, allergies, and pulmonary diseases. Further non-limiting examples of diseases associated with inappropriate activation of the complement system include acute antibody-mediate rejection, age-related macular degeneration (e.g. wet or dry age-related macular degeneration), allergic asthma, allergic bronchopulmonary aspergillosis, allergic neuritis, allergic rhinitis, Alzheimer's disease, amyotrophic lateral sclerosis, anaphylaxis, atopic dermatitis, atypical hemolytic syndrome (aHUS), autoimmune diseases, autoimmune hemolytic anemia, Bechet's disease, Behcet's disease, bronchiolitis, bronchiolitis obliterans, C3 glomerulopathy, cancer, central nervous system (CNS) inflammatory disorders, choroidal neovascularization (CNV), choroiditis, chronic allograft vasculopathy, chronic hepatitis, chronic inflammation, chronic inflammatory diseases, chronic muscle inflammation, chronic pain, chronic pancreatitis, chronic rejection of a transplant or graft, chronic urticaria, Churg-Strauss syndrome, conjunctivitis, cyclitis, demyelinating diseases, dermatitis, dermatomyositis, diabetic retinopathy, diseases of the circulatory system, disorders associated with excessive or inappropriate activity of IgE-producing cells, disorders associated with high levels or inappropriate activity of CD4+ helper T cells of the Th17 subtype, encephalitis, eosinophilic pneumonia, eye disorders, geographic atrophy, giant cell arteritis, gingivitis, glaucoma, glomerulonephritis, glomerulonephritis (e.g., membranoproliferative glomerulonephritis or membranous glomerulonephritis), graft rejection or failure, HELLP syndrome, Henoch-Schonlein purpura, hepatitis (e.g. hepatitis C), Huntington's disease, hyperacute rejection, hypersensitivity pneumonitis, idiopathic pulmonary fibrosis (IPF), IgA nephropathy (IgAN), inflammatory bowel diseases (e.g. Crohn's disease or ulcerative colitis), inflammatory joint conditions (e.g. arthritis such as rheumatoid arthritis or psoriatic arthritis, juvenile chronic arthritis, spondyloarthropathies Reiter's syndrome, or gout), inflammatory skin diseases, infusion reaction, interstitial pneumonia, iridocyclitis, iritis, ischemia/reperfusion injury, Kawasaki disease, keratitis, lupus nephritis, membranoproliferative glomerulonephritis (MPGN) (e.g. MPGN type I, type II, or type III), meningitis, microscopic polyangiitis, multiple sclerosis (MS), myasthenia gravis, myocarditis, nasal polyposis, neurodegenerative diseases, neuromyelitis optica, neuromyelitis optica (NMO), neuropathic pain, ocular inflammation, osteoarthritis, pancreatitis, panniculitis, Parkinson's disease, paroxysmal nocturnal hemoglobinuria (PNH), pars planitis, pathologic immune responses to tissue/organ transplantation, pemphigoid, pemphigus, periodontitis, persistent asthma, polyarteritis nodosa, polymyositis, primary membranous nephropathy, proliferative vitreoretinopathy, proteinuria, psoriasis, pulmonary fibrosis (e.g. idiopathic pulmonary fibrosis), radiation-induced lung injury, renal disease, respiratory disease or disorders (e.g. asthma or chronic obstructive pulmonary disease (COPD), oridiopathic pulmonary fibrosis, or asthma), respiratory distress syndrome, retinal neovascularization (RNV), retinopathy of prematurity, rheumatoid arthritis (RA), rhinosinusitis, sarcoid, sarcoidosis, scleritis, scleroderma, sclerodermatomyositis, sclerosis, sepsis, Sjogren syndrome, Sjogren's syndrome, stroke, systemic lupus erythematosus, systemic scleroderma, Takayasu's arteritis, Th2-associated disorders (e.g. a disorder associated with high levels or high activation of CD4+ helper T cells of the Th2 subtype), thyroiditis (e.g. Hashimoto's thyroiditis, Graves' disease, or post-partum thyroiditis), thyroidoisis, transplant damage, transplant rejection, ulcerative colitis, uveitis, vasculitis, and Wegener's granulomatosis. In embodiments, the methods of the disclosure involve reducing complement-mediated hemolysis in a subject. Further non-limiting examples of diseases include Creutzfeldt-Jakob disease, Pick's disease, mild cognitive impairment, fibromyalgia, frontotemporal dementia, dementia with Lewy bodies, multiple system atrophy, chronic inflammatory, demyelinating polyneuropathy, Guillain-Barre syndrome, multifocal motor neuropathy, non-alcoholic fatty liver disease (NAFLD) e.g., non-alcoholic steatohepatitis (NASH), and Stargardt macular dystrophy.

[0219] The methods and compositions of the present disclosure are suitable in embodiments for use in treatment of any of the above-listed diseases or disorders related to improper activation of the complement system. In various instances, the methods involve introducing a modification to a C3 polynucleotide that results in reduced expression and/or activity of a C3 polypeptide in a cell.

### Editing of Target Genes

[0220] Exemplary spacer sequences suitable for use in guide RNAs that can be used to produce the polynucleotide edits described herein (e.g., missense mutations, introduction of stop codons, splice-site disruption mutations, etc.) are listed in Tables 1A-1F, and 2 below. To produce the polynucleotide edits, cells (e.g., cells in or from a subject) are contacted with one or more guide RNAs containing one or more of the spacer sequences listed in Tables 1A-1F, or 2 below, or fragments thereof, and a nucleobase editor polypeptide or complex containing a nucleic acid programmable DNA binding protein (napDNAbp) and one or more deaminases with cytidine deaminase and/or adenosine deaminase activity (e.g., a “dual deaminase” which has cytidine and adenosine deaminase activity). In embodiments, the base editor and/or endonuclease is introduced to the cell using a polynucleotide sequence (e.g., mRNA) encoding the base editor and/or endonuclease. Tables 1A-1F, and 2 below lists representative guide RNA spacer sequences that can be used in combination with the indicated base editors. Guide RNAs containing the spacer sequences listed in Tables 1A-1F, and 2 can be used to target the target sequences listed in Tables 1A-1F, and 2 to effect the edits listed in Tables 1A-1F, and 2. In some embodiments, the gRNA comprises nucleotide analogs. In some instances, the gRNA is added directly to a cell. These nucleotide analogs can inhibit degradation of the gRNA from cellular processes. Tables 1A-1F, and 2 provide target sequences to be used for gRNAs. Further exemplary spacer sequences suitable for use in gRNA sequences for use in the methods provided herein include fragments of any of the spacers provided in Tables 1A-1F, and 2 as well as any of the spacers provided in Tables 1A-1F, and 2 modified to include an extension or truncation at the 3′ and/or 5′ end(s). In embodiments, a spacer sequence of Tables 1A-1F, and 2 can be modified to include a 1, 2, 3, 4, 5, 6, 7, 8, 9, or 10 nucleotide extension or truncation at the 3′ and/or 5′ end(s).

[0221] In various instances, it is advantageous for a spacer sequence to include a 5′ and/or a 3′ “G” nucleotide. In some cases, for example, any spacer sequence or guide polynucleotide provided herein comprises or further comprises a 5′ “G”, where, in some embodiments, the 5′ “G” is or is not complementary to a target sequence. In some embodiments, the 5′ “G” is added to a spacer sequence that does not already contain a 5′ “G.” For example, it can be advantageous for a guide RNA to include a 5′ terminal “G” when the guide RNA is expressed under the control of a U6 promoter or the like because the U6 promoter prefers a “G” at the transcription start site (see Cong, L. et al. “Multiplex genome engineering using CRISPR/Cas systems. Science 339:819-823 (2013) doi: 10.1126/science.1231143). In some cases, a 5′ terminal “G” is added to a guide polynucleotide that is to be expressed under the control of a promoter but is optionally not added to the guide polynucleotide if or when the guide polynucleotide is not expressed under the control of a promoter.

[0222] In some embodiments, a guide polynucleotide of the disclosure contains a scaffold with one of the following chemical modification schemes, where “N” represents any nucleotide, “mN” indicates a 2′-OMe modification of the nucleotide “N”, and “Ns” indicates that the nucleotide “N” is linked to the following nucleotide by a phosphorothioate (PS):

End-mod SpCas9 guide polynucleotide

(SEQ ID NO: 943)
mNsmNsmNsNNNNNNNNNNNNNNNNNGUUUUAGAGCUAGAAAUAGCAAGU
UAAAAUAAGGCUAGUCCGUUAUCAACUUGAAAAAGUGGCACCGAGUCGGU
GCUsmUsmUsmU

End-mod SaCas9 guide polynucleotide

(SEQ ID NO: 944)
mNsmNsmNsNNNNNNNNNNNNNNNNNNGUUUUAGUACUCUGUAAUGAAAA
UUACAGAAUCUACUAAAACAAGGCAAAAUGCCGUGUUUAUCUCGUCAACU
UGUUGGCGAGAUsmUsmUsmU

### HM01:

(SEQ ID NO: 855)
mNsmNsmNsNNNNNNNNNNNNNNNNNGUUUUAGAmGmCmUmAmGmAmAmA
mUmAmGmCAAGUUAAAAUAAGGCUAGUCCGUUAUCAmAmCmUmUmGmAmA
mAmAmAmGmUmGmGmCmAmCmCmGmAmGmUmCmGmGmUmGmCmUsmUsmU
smU

### HM07:

(SEQ ID NO: 856)
mNsmNsmNsmNmNmNmNmNmNmNNNNNNNNNNNmGUUUUAGmAmGmCmUm
AmGmAmAmAmUmAmGmCmAmAGUUmAAmAAmUAmAmGmGmCmUmAGUmCm
CGUUAmUmCAAmCmUmUmGmAmAmAmAmAmGmUmGGmCmAmCmCmGmAmG
mUmCmGmGmUmGmCmUsmUsmUsmU

### NLS (Bpsv40):

(SEQ ID NOs: 857 and 858)
mNsmNsmNsNNNNNNNNNNNNNNNNNGUUUUAGAGCUAGAAAUAGCAAGU
UAAAAUAAGGCUAGUCCGUUAUCAACUUGAAAAAGUGGCACCGAGUCGGU
GCmUsmUsmUsmU-NHC6-CrossL-ac-CKRTADGSEFESPKKKRKV

### LONGEST:

(SEQ ID NO: 859)
mNsmNsmNsNNNNNNNNNNNNNNNNNGUUUUAGAmGmCmCmGmGmCmGmG
mAmAmAmCmGmCmCmGmGmCAAGUUAAAAUAAGGCUAGUCCGUUAUCAmA
mCmUmUmGmAmAmAmAmAmGUGmGmCmAmCmCmGmAmGmUmCmGmGmUmG
mCmUsmUsmUsmU

### NLS+LONGEST:

(SEQ ID NOs: 860 and 858)
mNsmNsmNsNNNNNNNNNNNNNNNNNGUUUUAGAmGmCmCmGmGmCmGmG
mAmAmAmCmGmCmCmGmGmCAAGUUAAAAUAAGGCUAGUCCGUUAUCAmA
mCmUmUmGmAmAmAmAmAmGmUmGmGmCmAmCmCmGmAmGmUmCmGmGmU
mGmCmUsmUsmUsmU-NHC5-CrossL-CKRTADGSEFESPKKKRKV

### LONGEST+GOLD:

(SEQ ID NO: 861)
mNsmNsmNsNNNNNNNNNNNNNNNNNGUUUUAGAmGmCmCmGmGmCmGmG
mAmAmAmCmGmCmCmGmGmCAAGUUAAAAUAAGGCUAGUCCGUUAmUmCA
AmCmUmUGGACUUCGGUCCmAmAmGUGGmCmAmCmCmGmAmGmUmCmGmG
mUmGmCmUsmUsmUsmU

[0223] Exemplary guide RNA sequences are provided in the following Tables 1A-1F, and 2.

TABLE 1A
List of C3 knock-out (KO) guides screened in Hek293T cells,
the associated protospacer regions, the editor(s)
associated with each, and the mechanism for KO generation.

| | | SEQ | | SEQ | | |
|---|---|---|---|---|---|---|
| | | ID | | ID | | |
| Guide | Protospacer | NO | Spacer | NO | Editor(s) | Mechanism |
| gRNA658 | CACTCACCATAG | 426 | CACUCACCAUA | 588 | ABE8.8_SpCas9 | Splice |
| | TCCACTCC | | GUCCACUCC | | | Site |
| gRNA659 | GGAACTCACCCT | 427 | GGAACUCACCC | 589 | ABE8.8_SpCas9 | Splice |
| | CAGCACAG | | UCAGCACAG | | | Site |
| gRNA660 | CTGCTCACCCAG | 428 | CUGCUCACCCA | 590 | ABE8.8_SpCas9, | Splice |
| | GTTGTAAT | | GGUUGUAAU | | BE4_SpCas9 | Site |
| gRNA661 | CTTACCTGGTAC | 429 | CUUACCUGGUA | 591 | ABE8.8_SpCas9, | Splice |
| | AGATCTCA | | CAGAUCUCA | | BE4_SpCas9 | Site |
| gRNA662 | CTTTTACCTGTT | 430 | CUUUUACCUGU | 592 | ABE8.8_SpCas9 | Splice |
| | TCCGGTGC | | UUCCGGUGC | | | Site |
| gRNA663 | TCCTTACCGACA | 431 | UCCUUACCGAC | 593 | ABE8.8_SpCas9, | Splice |
| | AGGTGCCT | | AAGGUGCCU | | BE4_SpCas9 | Site |
| gRNA664 | ACTGTACCTCTT | 432 | ACUGUACCUCU | 594 | ABE8.8_SpCas9, | Splice |
| | CTGATCGC | | UCUGAUCGC | | BE4_SpCas9 | Site |
| gRNA665 | AGCCTCTTACAA | 433 | AGCCUCUUACA | 595 | ABE8.8_SpCas9 | Splice |
| | TCATTTCT | | AUCAUUUCU | | | Site |
| gRNA666 | AAGCACTCACCA | 434 | AAGCACUCACC | 596 | ABE8.8_SpCas9 | Splice |
| | CGACCTTC | | ACGACCUUC | | | Site |
| gRNA667 | AGCACTCACCAC | 435 | AGCACUCACCA | 597 | ABE8.8_SpCas9 | Splice |
| | GACCTTCA | | CGACCUUCA | | | Site |
| gRNA668 | CGGGACCCACCT | 436 | CGGGACCCACC | 598 | ABE8.8 SpCas9 | Splice |
| | TGAGCTCT | | UUGAGCUCU | | | Site |
| gRNA669 | CGGCCTTACCCA | 437 | CGGCCUUACCC | 599 | ABE8.8_SpCas9, | Splice |
| | TTTTTCGG | | AUUUUUCGG | | BE4_SpCas9 | Site |
| gRNA670 | CACACTTACCGA | 438 | CACACUUACCG | 600 | ABE8.8_SpCas9 | Splice |
| | GCCCACGC | | AGCCCACGC | | | Site |
| gRNA671 | CAGACGCACCGT | 439 | CAGACGCACCG | 601 | ABE8.8_SpCas9, | Splice |
| | GATGCTCA | | UGAUGCUCA | | BE4_SpCas9 | Site |
| gRNA672 | AGACGCACCGTG | 440 | AGACGCACCGU | 602 | ABE8.8_SpCas9, | Splice |
| | ATGCTCAA | | GAUGCUCAA | | BE4_SpCas9 | Site |
| gRNA673 | GGTCTCACCATG | 441 | GGUCUCACCAU | 603 | ABE8.8_SpCas9 | Splice |
| | AGGTCAAA | | GAGGUCAAA | | | Site |
| gRNA674 | CTCACCTGAGTG | 442 | CUCACCUGAGU | 604 | ABE8.8_SpCas9 | Splice |
| | CAAGATGA | | GCAAGAUGA | | | Site |
| gRNA675 | ATGGTACCGGAA | 443 | AUGGUACCGGA | 605 | ABE8.8_SpCas9, | Splice |
| | TGCGCTTG | | AUGCGCUUG | | BE4_SpCas9 | Site |
| gRNA676 | TGGTACCGGAAT | 444 | UGGUACCGGAA | 606 | ABE8.8_SpCas9, | Splice |
| | GCGCTTGA | | UGCGCUUGA | | BE4_SpCas9 | Site |
| gRNA677 | AGTCCCTCACCT | 445 | AGUCCCUCACC | 607 | ABE8.8_SpCas9 | Splice |
| | GGCGGTGA | | UGGCGGUGA | | | Site |
| gRNA678 | CTGACATACTTG | 446 | CUGACAUACUU | 608 | ABE8.8_SpCas9 | Splice |
| | ACGAGTTC | | GACGAGUUC | | | Site |
| gRNA679 | ACGCCTAGATCC | 447 | ACGCCUAGAUC | 609 | ABE8.8_SpCas9 | Splice |
| | CAGCCAAC | | CCAGCCAAC | | | Site |
| gRNA680 | CGCCTAGATCCC | 448 | CGCCUAGAUCC | 610 | ABE8.8_SpCas9 | Splice |
| | AGCCAACA | | CAGCCAACA | | | Site |
| gRNA681 | CCCAGTGCTGCC | 449 | CCCAGUGCUGC | 611 | ABE8.8_SpCas9 | Splice |
| | CAGTTTCG | | CCAGUUUCG | | | Site |
| gRNA682 | TGTCCCGTAGGT | 450 | UGUCCCGUAGG | 612 | ABE8.8_SpCas9 | Splice |
| | TCCTCTAC | | UUCCUCUAC | | | Site |
| gRNA683 | TCTCAGATTGAG | 451 | UCUCAGAUUGA | 613 | ABE8.8_SpCas9 | Splice |
| | GATGGCTC | | GGAUGGCUC | | | Site |
| gRNA684 | CTCAGATTGAGG | 452 | CUCAGAUUGAG | 614 | ABE8.8_SpCas9 | Splice |
| | ATGGCTCG | | GAUGGCUCG | | | Site |
| gRNA685 | GTCCCCCCAGAT | 453 | GUCCCCCCAGA | 615 | ABE8.8_SpCas9 | Splice |
| | CATGAACA | | UCAUGAACA | | | Site |
| gRNA686 | TCCCCCCAGATC | 454 | UCCCCCCAGAU | 616 | ABE8.8_SpCas9 | Splice |
| | ATGAACAA | | CAUGAACAA | | | Site |
| gRNA687 | CCCAGATCATGA | 455 | CCCAGAUCAUG | 617 | ABE8.8_SpCas9 | Splice |
| | ACAAGGGC | | AACAAGGGC | | | Site |
| gRNA688 | CCCCCCGCAGAT | 456 | CCCCCCGCAGA | 618 | ABE8.8_SpCas9 | Splice |
| | CTGGGACG | | UCUGGGACG | | | Site |
| gRNA689 | CCCGCAGATCTG | 457 | CCCGCAGAUCU | 619 | ABE8.8_SpCas9 | Splice |
| | GGACGTGG | | GGGACGUGG | | | Site |
| gRNA690 | CGCAGTCGGCAA | 458 | CGCAGUCGGCA | 620 | ABE8.8_SpCas9 | Splice |
| | GTACCCCA | | AGUACCCCA | | | Site |
| gRNA691 | CTCCAGGCTGAC | 459 | CUCCAGGCUGA | 621 | ABE8.8_SpCas9 | Splice |
| | CGCCTACG | | CCGCCUACG | | | Site |
| gRNA692 | TCTTTGCAGATA | 460 | UCUUUGCAGAU | 622 | ABE8.8_SpCas9 | Splice |
| | AGAACCGC | | AAGAACCGC | | | Site |
| gRNA693 | CTTTGCAGATAA | 461 | CUUUGCAGAUA | 623 | ABE8.8_SpCas9 | Splice |
| | GAACCGCT | | AGAACCGCU | | | Site |
| gRNA694 | TGCAGATAAGAA | 462 | UGCAGAUAAGA | 624 | ABE8.8_SpCas9 | Splice |
| | CCGCTGGG | | ACCGCUGGG | | | Site |
| gRNA695 | ATCCAGGTACCG | 463 | AUCCAGGUACC | 625 | ABE8.8_SpCas9 | Splice |
| | GGGAGACC | | GGGGAGACC | | | Site |
| gRNA696 | CCGCAGAGGAAA | 464 | CCGCAGAGGAA | 626 | ABE8.8_SpCas9 | Splice |
| | GCTGTACC | | AGCUGUACC | | | Site |
| gRNA697 | CACAGTGTACAA | 465 | CACAGUGUACA | 627 | ABE8.8_SpCas9 | Splice |
| | GACCCGAC | | AGACCCGAC | | | Site |
| gRNA698 | TCCAGGCTCGGA | 466 | UCCAGGCUCGG | 628 | ABE8.8_SpCas9 | Splice |
| | TGAGGTGC | | AUGAGGUGC | | | Site |
| gRNA699 | TCCAGCCTCAGC | 467 | UCCAGCCUCAG | 629 | ABE8.8_SpCas9 | Splice |
| | TACATCAT | | CUACAUCAU | | | Site |
| gRNA700 | CAGCCTTACCTT | 468 | CAGCCUUACCU | 630 | ABE8.8_SpCas9- | Splice |
| | GTCCAGGT | | UGUCCAGGU | | VRQR | Site |
| gRNA701 | CTGTACCTCTTC | 469 | CUGUACCUCUU | 631 | ABE8.8_SpCas9- | Splice |
| | TGATCGCA | | CUGAUCGCA | | VRQR, | Site |
| | | | | | BE4_SpCas9- | |
| | | | | | VRQR | |
| gRNA702 | CCTCACCTTTGG | 470 | CCUCACCUUUG | 632 | ABE8.8_SpCas9- | Splice |
| | CTGTGGTC | | GCUGUGGUC | | VRQR | Site |
| gRNA703 | GCACTCACCACG | 471 | GCACUCACCAC | 633 | ABE8.8_SpCas9- | Splice |
| | ACCTTCAG | | GACCUUCAG | | VRQR, | Site |
| | | | | | BE4_SpCas9- | |
| | | | | | VRQR | |
| gRNA704 | ACACTTACCGAG | 472 | ACACUUACCGA | 634 | ABE8.8_SpCas9- | Splice |
| | CCCACGCA | | GCCCACGCA | | VRQR, | Site |
| | | | | | BE4_SpCas9- | |
| | | | | | VRQR | |
| gRNA705 | CTATGGTACCGG | 473 | CUAUGGUACCG | 635 | ABE8.8_SpCas9- | Splice |
| | AATGCGCT | | GAAUGCGCU | | VRQR, | Site |
| | | | | | BE4_SpCas9- | |
| | | | | | VRQR | |
| gRNA706 | GGTACCGGAATG | 474 | GGUACCGGAAU | 636 | ABE8.8_SpCas9- | Splice |
| | CGCTTGAG | | GCGCUUGAG | | VRQR, | Site |
| | | | | | BE4_SpCas9- | |
| | | | | | VRQR | |
| gRNA707 | CCCTCACCTGGC | 475 | CCCUCACCUGG | 637 | ABE8.8_SpCas9- | Splice |
| | GGTGATGG | | CGGUGAUGG | | VRQR, | Site |
| | | | | | BE4_SpCas9- | |
| | | | | | VRQR | |
| gRNA708 | TGACATACTTGA | 476 | UGACAUACUUG | 638 | ABE8.8_SpCas9- | Splice |
| | CGAGTTCC | | ACGAGUUCC | | VRQR | Site |
| gRNA709 | TGGCACCTCAAT | 477 | UGGCACCUCAA | 639 | ABE8.8_SpCas9- | Splice |
| | GTTGACCA | | UGUUGACCA | | VRQR, | Site |
| | | | | | BE4_SpCas9- | |
| | | | | | VRQR | |
| gRNA710 | GCCTAGATCCCA | 478 | GCCUAGAUCCC | 640 | ABE8.8_SpCas9- | Splice |
| | GCCAACAG | | AGCCAACAG | | VRQR | Site |
| gRNA711 | TCCTCACAGCAT | 479 | UCCUCACAGCA | 641 | ABE8.8_SpCas9- | Splice |
| | GGGCCAGT | | UGGGCCAGU | | VRQR | Site |
| gRNA712 | GTCCCGTAGGTT | 480 | GUCCCGUAGGU | 642 | ABE8.8_SpCas9- | Splice |
| | CCTCTACG | | UCCUCUACG | | VRQR | Site |
| gRNA713 | CCGTAGGTTCCT | 481 | CCGUAGGUUCC | 643 | ABE8.8_SpCas9- | Splice |
| | CTACGGGA | | UCUACGGGA | | VRQR | Site |
| gRNA714 | CCCCACCCAGGT | 482 | CCCCACCCAGG | 644 | ABE8.8_SpCas9- | Splice |
| | GCGCACGA | | UGCGCACGA | | VRQR | Site |
| gRNA715 | CCGCAGATCTGG | 483 | CCGCAGAUCUG | 645 | ABE8.8_SpCas9- | Splice |
| | GACGTGGT | | GGACGUGGU | | VRQR | Site |
| gRNA716 | CCCCCTGCAGGT | 484 | CCCCCUGCAGG | 646 | ABE8.8_SpCas9- | Splice |
| | AACCTGGA | | UAACCUGGA | | VRQR | Site |
| gRNA717 | CCTGCAGGTAAC | 485 | CCUGCAGGUAA | 647 | ABE8.8_SpCas9- | Splice |
| | CTGGATGA | | CCUGGAUGA | | VRQR | Site |
| gRNA718 | CGAGCAGGGATC | 486 | CGAGCAGGGAU | 648 | ABE8.8_SpCas9- | Splice |
| | TGTGTGGC | | CUGUGUGGC | | VRQR | Site |
| gRNA719 | CTGCGTAGCCGG | 487 | CUGCGUAGCCG | 649 | ABE8.8_SpCas9- | Splice |
| | AAGGAATC | | GAAGGAAUC | | VRQR | Site |
| gRNA720 | TCTATCTCAGGG | 488 | UCUAUCUCAGG | 650 | ABE8.8_SpCas9- | Splice |
| | TGGATTAC | | GUGGAUUAC | | VRQR | Site |
| gRNA721 | TTTGCAGATAAG | 489 | UUUGCAGAUAA | 651 | ABE8.8_SpCas9- | Splice |
| | AACCGCTG | | GAACCGCUG | | VRQR | Site |
| gRNA722 | CCCCAGCTGGCC | 490 | CCCCAGCUGGC | 652 | ABE8.8_SpCas9- | Splice |
| | AATGGTGT | | CAAUGGUGU | | VRQR | Site |
| gRNA723 | CCCCCACAGTGT | 491 | CCCCCACAGUG | 653 | ABE8.8_SpCas9- | Splice |
| | ACAAGACC | | UACAAGACC | | VRQR | Site |
| gRNA724 | AACTCACCCTCA | 492 | AACUCACCCUC | 654 | ABE8.8 SaCas9- | Splice |
| | GCACAGCGG | | AGCACAGCGG | | KKH, | Site |
| | | | | | BE4 SaCas9- | |
| | | | | | KKH | |
| gRNA725 | ATGCAGCCTTAC | 493 | AUGCAGCCUUA | 655 | ABE8.8 SaCas9- | Splice |
| | CTTGTCCAG | | CCUUGUCCAG | | KKH | Site |
| gRNA726 | CAGCCTTACCTT | 494 | CAGCCUUACCU | 656 | ABE8.8 SaCas9- | Splice |
| | GTCCAGGTA | | UGUCCAGGUA | | KKH, | Site |
| | | | | | BE4 SaCas9- | |
| | | | | | KKH | |
| gRNA727 | TTCTTACCTGGT | 495 | UUCUUACCUGG | 657 | ABE8.8 SaCas9, | Splice |
| | ACAGATCTC | | UACAGAUCUC | | BE4_SaCas9 | Site |
| gRNA728 | TTCCTTTTACCT | 496 | UUCCUUUUACC | 658 | ABE8.8 SaCas9- | Splice |
| | GTTTCCGGT | | UGUUUCCGGU | | KKH | Site |
| gRNA729 | CCCTCACCTTTG | 497 | CCCUCACCUUU | 659 | ABE8.8 SaCas9- | Splice |
| | GCTGTGGTC | | GGCUGUGGUC | | KKH, | Site |
| | | | | | BE4 SaCas9- | |
| | | | | | KKH | |
| gRNA730 | TGTCTCACCTTG | 498 | UGUCUCACCUU | 660 | ABE8.8 SaCas9- | Splice |
| | CAGGAGAAT | | GCAGGAGAAU | | KKH | Site |
| gRNA731 | GGGACCTACTCC | 499 | GGGACCUACUC | 661 | ABE8.8 SaCas9- | Splice |
| | TGGCCAGGC | | CUGGCCAGGC | | KKH | Site |
| gRNA732 | GGCGACCTCACC | 500 | GGCGACCUCAC | 662 | ABE8.8 SaCas9- | Splice |
| | TGCCCTCTG | | CUGCCCUCUG | | KKH, | Site |
| | | | | | BE4 SaCas9- | |
| | | | | | KKH | |
| gRNA733 | CTGGCCCTTACC | 501 | CUGGCCCUUAC | 663 | ABE8.8 SaCas9- | Splice |
| | TTACTCTGC | | CUUACUCUGC | | KKH, | Site |
| | | | | | BE4 SaCas9- | |
| | | | | | KKH | |
| gRNA734 | GCACACTTACCG | 502 | GCACACUUACC | 664 | ABE8.8 SaCas9, | Splice |
| | AGCCCACGC | | GAGCCCACGC | | BE4 SaCas9 | Site |
| gRNA735 | GGCCTCACCTGA | 503 | GGCCUCACCUG | 665 | ABE8.8 SaCas9- | Splice |
| | GTGCAAGAT | | AGUGCAAGAU | | KKH, | Site |
| | | | | | BE4 SaCas9- | |
| | | | | | KKH | |
| gRNA736 | TATGGTACCGGA | 504 | UAUGGUACCGG | 666 | ABE8.8 SaCas9, | Splice |
| | ATGCGCTTG | | AAUGCGCUUG | | BE4 SaCas9 | Site |
| gRNA737 | CCTGACATACTT | 505 | CCUGACAUACU | 667 | ABE8.8 SaCas9, | Splice |
| | GACGAGTTC | | UGACGAGUUC | | BE4 SaCas9 | Site |
| gRNA738 | CCCAGCCTCACC | 506 | CCCAGCCUCAC | 668 | ABE8.8 SaCas9 | Splice |
| | TGTGGAGCC | | CUGUGGAGCC | | | Site |
| gRNA739 | ACGCCTAGATCC | 507 | ACGCCUAGAUC | 669 | ABE8.8 SaCas9 | Splice |
| | CAGCCAACA | | CCAGCCAACA | | | Site |
| gRNA740 | CCCACAGAACCC | 508 | CCCACAGAACC | 670 | ABE8.8 SaCas9- | Splice |
| | GGAAGGCAT | | CGGAAGGCAU | | KKH | Site |
| gRNA741 | TCCTCACAGCAT | 509 | UCCUCACAGCA | 671 | ABE8.8 SaCas9- | Splice |
| | GGGCCAGTG | | UGGGCCAGUG | | KKH | Site |
| gRNA742 | TCCCCCAGTGCT | 510 | UCCCCCAGUGC | 672 | ABE8.8 SaCas9- | Splice |
| | GCCCAGTTT | | UGCCCAGUUU | | KKH | Site |
| gRNA743 | CACTGCGTAGCC | 511 | CACUGCGUAGC | 673 | ABE8.8 SaCas9 | Splice |
| | GGAAGGAAT | | CGGAAGGAAU | | | Site |
| gRNA744 | TGCTGCAGGGAC | 512 | UGCUGCAGGGA | 674 | ABE8.8 SaCas9- | Splice |
| | CCCAGTGGC | | CCCCAGUGGC | | KKH | Site |
| gRNA745 | CCACTCCAGGCT | 513 | CCACUCCAGGC | 675 | ABE8.8 SaCas9- | Splice |
| | GACCGCCTA | | UGACCGCCUA | | KKH | Site |
| gRNA746 | GTGTTTCTAGAA | 514 | GUGUUUCUAGA | 676 | ABE8.8 SaCas9 | Splice |
| | AAGAGGCCT | | AAAGAGGCCU | | | Site |
| gRNA747 | CTATCCAGGTAC | 515 | CUAUCCAGGUA | 677 | ABE8.8 SaCas9 | Splice |
| | CGGGGAGAC | | CCGGGGAGAC | | | Site |
| gRNA748 | CCCCCTCAGGTC | 516 | CCCCCUCAGGU | 678 | ABE8.8 SaCas9 | Splice |
| | TCACACTCT | | CUCACACUCU | | | Site |
| gRNA749 | TGCCCGCAGAGG | 517 | UGCCCGCAGAG | 679 | ABE8.8 SaCas9- | Splice |
| | AAAGCTGTA | | GAAAGCUGUA | | KKH | Site |
| gRNA750 | CCCCACAGTGTA | 518 | CCCCACAGUGU | 680 | ABE8.8 SaCas9- | Splice |
| | CAAGACCCG | | ACAAGACCCG | | KKH | Site |
| gRNA751 | CACTCCAGGCTC | 519 | CACUCCAGGCU | 681 | ABE8.8 SaCas9- | Splice |
| | GGATGAGGT | | CGGAUGAGGU | | KKH | Site |
| gRNA752 | AGATTCCCAGTG | 520 | AGAUUCCCAGU | 682 | BE4_SpCas9 | Stop |
| | GATACGGT | | GGAUACGGU | | | Codon |
| gRNA753 | TTGAGCCAACGC | 521 | UUGAGCCAACG | 683 | BE4_SpCas9 | Stop |
| | ACGACGGG | | CACGACGGG | | | Codon |
| gRNA754 | TCACCACGGCCC | 522 | UCACCACGGCC | 684 | BE4_SpCas9 | Splice |
| | AGGCGTTC | | CAGGCGUUC | | | Site |
| gRNA755 | TTCCGGCTACGC | 523 | UUCCGGCUACG | 685 | BE4_SpCas9 | Splice |
| | AGTGTTAG | | CAGUGUUAG | | | Site |
| gRNA756 | CGGCTACGCAGT | 524 | CGGCUACGCAG | 686 | BE4_SpCas9 | Splice |
| | GTTAGAGG | | UGUUAGAGG | | | Site |
| gRNA757 | ACCACGTCCCAG | 525 | ACCACGUCCCA | 687 | BE4_SpCas9 | Stop |
| | ATCTGCGG | | GAUCUGCGG | | | Codon |
| gRNA758 | AACCTACGGGAC | 526 | AACCUACGGGA | 688 | BE4_SpCas9 | Splice |
| | AGACAAGG | | CAGACAAGG | | | Site |
| gRNA759 | TACCTGTCGGAG | 527 | UACCUGUCGGA | 689 | BE4_SpCas9 | Splice |
| | TGGGGCAC | | GUGGGGCAC | | | Site |
| gRNA760 | CGGGACCCAAGT | 528 | CGGGACCCAAG | 690 | BE4_SpCas9 | Stop |
| | GGTGGAGA | | UGGUGGAGA | | | Codon |
| gRNA761 | TCTAACCCAGGG | 529 | UCUAACCCAGG | 691 | BE4_SpCas9 | Stop |
| | AGATGGCG | | GAGAUGGCG | | | Codon |
| gRNA762 | AAGACCGGCAGC | 530 | AAGACCGGCAG | 692 | BE4_SpCas9 | Stop |
| | CTGTACCT | | CCUGUACCU | | | Codon |
| gRNA763 | TGTTGTTCGAAA | 531 | UGUUGUUCGAA | 693 | BE4_SpCas9 | Stop |
| | CGAGCAGG | | ACGAGCAGG | | | Codon |
| gRNA764 | CGACTCCCAAGT | 532 | CGACUCCCAAG | 694 | BE4_SpCas9 | Stop |
| | CCTCTGCG | | UCCUCUGCG | | | Codon |
| gRNA765 | CCTACAGAGATC | 533 | CCUACAGAGAU | 695 | BE4_SpCas9 | Stop |
| | CTACACTG | | CCUACACUG | | | Codon |
| gRNA766 | TGGTAAGCAGCT | 534 | UGGUAAGCAGC | 696 | BE4_SpCas9 | Stop |
| | CTACAACG | | UCUACAACG | | | Codon |
| gRNA767 | GAACAGAGATAC | 535 | GAACAGAGAUA | 697 | BE4_SpCas9 | Stop |
| | TACGGTGG | | CUACGGUGG | | | Codon |
| gRNA768 | CATACAAAAGTC | 536 | CAUACAAAAGU | 698 | BE4_SpCas9 | Stop |
| | GGATGACA | | CGGAUGACA | | | Codon |
| gRNA769 | CATTGAGCCAAC | 537 | CAUUGAGCCAA | 699 | BE4_SpCas9- | Stop |
| | GCACGACG | | CGCACGACG | | VRQR | Codon |
| gRNA770 | CAGCCATTTAAC | 538 | CAGCCAUUUAA | 700 | BE4_SpCas9- | Stop |
| | AGCCCCGC | | CAGCCCCGC | | VRQR | Codon |
| gRNA771 | CCTTCCGGCTAC | 539 | CCUUCCGGCUA | 701 | BE4_SpCas9- | Splice |
| | GCAGTGTT | | CGCAGUGUU | | VRQR | Site |
| gRNA772 | GGAACCTACGGG | 540 | GGAACCUACGG | 702 | BE4_SpCas9- | Splice |
| | ACAGACAA | | GACAGACAA | | VRQR | Site |
| gRNA773 | GGGGTGCAGAAC | 541 | GGGGUGCAGAA | 703 | BE4_SpCas9- | Stop |
| | CCCCGAGC | | CCCCCGAGC | | VRQR | Codon |
| gRNA774 | CTGCGAATGGAC | 542 | CUGCGAAUGGA | 704 | BE4_SpCas9- | Stop |
| | CGCGCCCA | | CCGCGCCCA | | VRQR | Codon |
| gRNA775 | CCGTGCAGCTCA | 543 | CCGUGCAGCUC | 705 | BE4_SpCas9- | Stop |
| | CGGAGAAG | | ACGGAGAAG | | VRQR | Codon |
| gRNA776 | TTCCCGAAGTGA | 544 | UUCCCGAAGUG | 706 | BE4_SpCas9- | Stop |
| | GTTCCCAG | | AGUUCCCAG | | VRQR | Codon |
| gRNA777 | GTTGTTCGAAAC | 545 | GUUGUUCGAAA | 707 | BE4_SpCas9- | Stop |
| | GAGCAGGT | | CGAGCAGGU | | VRQR | Codon |
| gRNA778 | CAATACCAAAAG | 546 | CAAUACCAAAA | 708 | BE4_SpCas9- | Stop |
| | GACGCCCC | | GGACGCCCC | | VRQR | Codon |
| gRNA779 | GTGCTCCACCCA | 547 | GUGCUCCACCC | 709 | BE4 SaCas9- | Stop |
| | AGTGTCCTT | | AAGUGUCCUU | | KKH | Codon |
| gRNA780 | GTACACTGTGGG | 548 | GUACACUGUGG | 710 | BE4 SaCas9- | Splice |
| | GGAGAGGCA | | GGGAGAGGCA | | KKH | Site |
| gRNA781 | GGCAGATTCCCA | 549 | GGCAGAUUCCC | 711 | BE4 SaCas9 | Stop |
| | GTGGATACG | | AGUGGAUACG | | | Codon |
| gRNA782 | AGATTCCCAGTG | 550 | AGAUUCCCAGU | 712 | BE4 SaCas9- | Stop |
| | GATACGGTG | | GGAUACGGUG | | KKH | Codon |
| gRNA783 | ACTTACGTTGAC | 551 | ACUUACGUUGA | 713 | BE4 SaCas9- | Splice |
| | CTGCTCCTC | | CCUGCUCCUC | | KKH | Site |
| gRNA784 | ACTCCTTCTGCA | 552 | ACUCCUUCUGC | 714 | BE4 SaCas9- | Splice |
| | GGGTGAGTG | | AGGGUGAGUG | | KKH | Site |
| gRNA785 | ACTCACCACGGC | 553 | ACUCACCACGG | 715 | BE4 SaCas9 | Splice |
| | CCAGGCGTT | | CCCAGGCGUU | | | Site |
| gRNA786 | TCCTTCCGGCTA | 554 | UCCUUCCGGCU | 716 | BE4 SaCas9- | Splice |
| | CGCAGTGTT | | ACGCAGUGUU | | KKH | Site |
| gRNA787 | CCAGAATCTCCC | 555 | CCAGAAUCUCC | 717 | BE4 SaCas9 | Stop |
| | ACGTGGTGA | | CACGUGGUGA | | | Codon |
| gRNA788 | CGTAGAGATTCT | 556 | CGUAGAGAUUC | 718 | BE4 SaCas9- | Splice |
| | GGATGGAGA | | UGGAUGGAGA | | KKH | Site |
| gRNA789 | TCCAGGTTACCT | 557 | UCCAGGUUACC | 719 | BE4 SaCas9- | Splice |
| | GCAGGGGGT | | UGCAGGGGGU | | KKH | Site |
| gRNA790 | ACGGACCAGGTA | 558 | ACGGACCAGGU | 720 | BE4 SaCas9 | Splice |
| | GGTGTAGTA | | AGGUGUAGUA | | | Site |
| gRNA791 | TGCGCACCTGGG | 559 | UGCGCACCUGG | 721 | BE4 SaCas9 | Splice |
| | TGGGGAAAG | | GUGGGGAAAG | | | Site |
| gRNA792 | CGAACACCTGTG | 560 | CGAACACCUGU | 722 | BE4 SaCas9- | Splice |
| | ATGTGGGGT | | GAUGUGGGGU | | KKH | Site |
| gRNA793 | CACTGCCTGAGG | 561 | CACUGCCUGAG | 723 | BE4 SaCas9 | Splice |
| | GGACCAGCT | | GGGACCAGCU | | | Site |
| gRNA794 | CTGGCCCATGCT | 562 | CUGGCCCAUGC | 724 | BE4 SaCas9 | Splice |
| | GTGAGGAGG | | UGUGAGGAGG | | | Site |
| gRNA795 | CCCATGCTGTGA | 563 | CCCAUGCUGUG | 725 | BE4_SaCas9 | Splice |
| | GGAGGGCGG | | AGGAGGGCGG | | | Site |
| gRNA796 | CCACGACGCGCA | 564 | CCACGACGCGC | 726 | BE4 SaCas9- | Stop |
| | AGGGGATGT | | AAGGGGAUGU | | KKH | Codon |
| gRNA797 | CTTCGGGACCCA | 565 | CUUCGGGACCC | 727 | BE4 SaCas9- | Stop |
| | AGTGGTGGA | | AAGUGGUGGA | | KKH | Codon |
| gRNA798 | CGGGATCCAGGA | 566 | CGGGAUCCAGG | 728 | BE4 SaCas9 | Stop |
| | TGGCGAACA | | AUGGCGAACA | | | Codon |
| gRNA799 | GCGAACAGAGGA | 567 | GCGAACAGAGG | 729 | BE4 SaCas9- | Stop |
| | TTTCCCTGC | | AUUUCCCUGC | | KKH | Codon |
| gRNA800 | GCAGAACCCCCG | 568 | GCAGAACCCCC | 730 | BE4 SaCas9- | Stop |
| | AGCAGAAGA | | GAGCAGAAGA | | KKH | Codon |
| gRNA801 | TCCAGCCTACCG | 569 | UCCAGCCUACC | 731 | BE4 SaCas9- | Stop |
| | AGTCCCCGT | | GAGUCCCCGU | | KKH | Codon |
| gRNA802 | CAGTCCAGGGCG | 570 | CAGUCCAGGGC | 732 | BE4 SaCas9- | Stop |
| | AGGACACTG | | GAGGACACUG | | KKH | Codon |
| gRNA803 | ACCTGGGCAGCA | 571 | ACCUGGGCAGC | 733 | BE4 SaCas9- | Stop |
| | GATGACCCT | | AGAUGACCCU | | KKH | Codon |
| gRNA804 | CTGACGCAGAGT | 572 | CUGACGCAGAG | 734 | BE4 SaCas9- | Stop |
| | AAGGTAAGG | | UAAGGUAAGG | | KKH | Codon |
| gRNA805 | GGCCAGCAGACC | 573 | GGCCAGCAGAC | 735 | BE4 SaCas9- | Stop |
| | GCCCAGAGG | | CGCCCAGAGG | | KKH | Codon |
| gRNA806 | GCAGACCGCCCA | 574 | GCAGACCGCCC | 736 | BE4 SaCas9- | Stop |
| | GAGGGCAGG | | AGAGGGCAGG | | KKH | Codon |
| gRNA807 | TTCCGTGCAGCT | 575 | UUCCGUGCAGC | 737 | BE4 SaCas9 | Stop |
| | CACGGAGAA | | UCACGGAGAA | | | Codon |
| gRNA808 | TGTTGTTCGAAA | 576 | UGUUGUUCGAA | 738 | BE4 SaCas9- | Stop |
| | CGAGCAGGT | | ACGAGCAGGU | | KKH | Codon |
| gRNA809 | GTGGAAATCCGA | 577 | GUGGAAAUCCG | 739 | BE4 SaCas9- | Stop |
| | GCCGTTCTC | | AGCCGUUCUC | | KKH | Codon |
| gRNA810 | TTACCGGCAGAA | 578 | UUACCGGCAGA | 740 | BE4 SaCas9- | Stop |
| | CCAAGAGCT | | ACCAAGAGCU | | KKH | Codon |
| gRNA811 | CGGCAGAACCAA | 579 | CGGCAGAACCA | 741 | BE4 SaCas9 | Stop |
| | GAGCTCAAG | | AGAGCUCAAG | | | Codon |
| gRNA812 | TCAGTGACCAAG | 580 | UCAGUGACCAA | 742 | BE4 SaCas9 | Stop |
| | TCCCGGACA | | GUCCCGGACA | | | Codon |
| gRNA813 | CCTGGAGAAGCA | 581 | CCUGGAGAAGC | 743 | BE4 SaCas9 | Stop |
| | GAAGCCCGA | | AGAAGCCCGA | | | Codon |
| gRNA814 | CTCAATGAACAG | 582 | CUCAAUGAACA | 744 | BE4 SaCas9- | Stop |
| | AGATACTAC | | GAGAUACUAC | | KKH | Codon |
| gRNA815 | CCTGACCACCAG | 583 | CCUGACCACCA | 745 | BE4 SaCas9- | Stop |
| | GAACTGAAC | | GGAACUGAAC | | KKH | Codon |
| gRNA816 | GCCTCCTGCGAT | 584 | GCCUCCUGCGA | 746 | BE4 SaCas9- | Stop |
| | CAGAAGAGG | | UCAGAAGAGG | | KKH | Codon |
| gRNA817 | CCAAAGATCAAC | 585 | CCAAAGAUCAA | 747 | BE4 SaCas9- | Stop |
| | TCACCTGTA | | CUCACCUGUA | | KKH | Codon |
| gRNA818 | GCTTATCCAGCC | 586 | GCUUAUCCAGC | 748 | BE4 SaCas9- | Stop |
| | TGGAGCAGT | | CUGGAGCAGU | | KKH | Codon |
| gRNA819 | CTTCATACAAAA | 587 | CUUCAUACAAA | 749 | BE4 SaCas9- | Stop |
| | GTCGGATGA | | AGUCGGAUGA | | KKH | Codon |

TABLE 1B
List of cyno surrogate C3 KO guides, the protospacer
associated with each guide, the associated human C3
KO guide, the editor(s) associated with each, and
the mechanism for KO generation.

| | | SEQ | | SEQ | | | |
|---|---|---|---|---|---|---|---|
| | | ID | | ID | Human | | |
| Guide | Protospacer | NO | Spacer | NO | Guide | Editor(s) | Mechanism |
| gRNA1793 | TGCTACCTGG | 750 | UGCUACCUGG | 752 | gRNA676 | ABE8.8_ | Splice |
| | ATGCGCTTGA | | AUGCGCUUGA | | | SpCas9 | Site |
| gRNA1798 | CTGCAGCGGA | 751 | CUGCAGCGGA | 753 | gRNA696 | ABE8.8_ | Splice |
| | AAGCTGTACC | | AAGCUGUACC | | | SpCas9 | Site |

TABLE 1C
List of C3 KO length series guides including the protospacer
sequences, the spacer sequences, the corresponding 20bp guide
name, the editor used for each, and the spacer length.

| | | SEQ | | SEQ | | | Proto- |
|---|---|---|---|---|---|---|---|
| | | ID | | ID | Associated | | spacer |
| Guide | Protospacer | NO | Spacer | NO | 20bp guide | Editor | Length |
| gRNA1680 | ATGGTACCGGAA | 797 | AUGGUACCGGA | 825 | gRNA676 | ABE8.8_ | 21 |
| | TGCGCTTGA | | AUGCGCUUGA | | | SpCas9 | |
| gRNA1681 | TATGGTACCGGA | 798 | UAUGGUACCGG | 826 | gRNA676 | ABE8.8_ | 22 |
| | ATGCGCTTGA | | AAUGCGCUUGA | | | SpCas9 | |
| gRNA1682 | CTATGGTACCGG | 799 | CUAUGGUACCG | 827 | gRNA676 | ABE8.8_ | 23 |
| | AATGCGCTTGA | | GAAUGCGCUUG | | | SpCas9 | |
| | | | A | | | | |
| gRNA1683 | GGTACCGGAATG | 800 | GGUACCGGAAU | 828 | gRNA676 | ABE8.8_ | 19 |
| | CGCTTGA | | GCGCUUGA | | | SpCas9 | |
| gRNA1684 | CCCGCAGAGGAA | 801 | CCCGCAGAGGA | 829 | gRNA696 | ABE8.8_ | 21 |
| | AGCTGTACC | | AAGCUGUACC | | | SpCas9 | |
| gRNA1685 | GCCCGCAGAGGA | 802 | GCCCGCAGAGG | 830 | gRNA696 | ABE8.8_ | 22 |
| | AAGCTGTACC | | AAAGCUGUACC | | | SpCas9 | |
| gRNA1686 | TGCCCGCAGAGG | 803 | UGCCCGCAGAG | 831 | gRNA696 | ABE8.8_ | 23 |
| | AAAGCTGTACC | | GAAAGCUGUAC | | | SpCas9 | |
| | | | C | | | | |
| gRNA1687 | CGCAGAGGAAAG | 804 | CGCAGAGGAAA | 832 | gRNA696 | ABE8.8_ | 19 |
| | CTGTACC | | GCUGUACC | | | SpCas9 | |
| gRNA1803 | ACTGTACCTCTT | 805 | ACUGUACCUCU | 833 | gRNA701 | ABE8.8_ | 21 |
| | CTGATCGCA | | UCUGAUCGCA | | | SpCas9- | |
| | | | | | | VRQR | |
| gRNA1804 | GACTGTACCTCT | 806 | GACUGUACCUC | 834 | gRNA701 | ABE8.8 | 22 |
| | TCTGATCGCA | | UUCUGAUCGCA | | | SpCas9- | |
| | | | | | | VRQR | |
| gRNA1805 | TGACTGTACCTC | 807 | UGACUGUACCU | 835 | gRNA701 | ABE8.8_ | 23 |
| | TTCTGATCGCA | | CUUCUGAUCGC | | | SpCas9- | |
| | | | A | | | VRQR | |
| gRNA1806 | TGTACCTCTTCT | 808 | UGUACCUCUUC | 836 | gRNA701 | ABE8.8_ | 19 |
| | GATCGCA | | UGAUCGCA | | | SpCas9- | |
| | | | | | | VRQR | |
| gRNA1807 | CCTTTTACCTGT | 809 | CCUUUUACCUG | 837 | gRNA662 | ABE8.8_ | 21 |
| | TTCCGGTGC | | UUUCCGGUGC | | | SpCas9 | |
| gRNA1808 | TCCTTTTACCTG | 810 | UCCUUUUACCU | 838 | gRNA662 | ABE8.8_ | 22 |
| | TTTCCGGTGC | | GUUUCCGGUGC | | | SpCas9 | |
| gRNA1809 | TTCCTTTTACCT | 811 | UUCCUUUUACC | 839 | gRNA662 | ABE8.8_ | 23 |
| | GTTTCCGGTGC | | UGUUUCCGGUG | | | SpCas9 | |
| | | | C | | | | |
| gRNA1810 | TTTTACCTGTTT | 812 | UUUUACCUGUU | 840 | gRNA662 | ABE8.8_ | 19 |
| | CCGGTGC | | UCCGGUGC | | | SpCas9 | |
| gRNA1811 | TCTTACCTGGTA | 813 | UCUUACCUGGU | 841 | gRNA661 | ABE8.8_ | 21 |
| | CAGATCTCA | | ACAGAUCUCA | | | SpCas9 | |
| gRNA1812 | TTCTTACCTGGT | 814 | UUCUUACCUGG | 842 | gRNA661 | ABE8.8_ | 22 |
| | ACAGATCTCA | | UACAGAUCUCA | | | SpCas9 | |
| gRNA1813 | CTTCTTACCTGG | 815 | CUUCUUACCUG | 843 | gRNA661 | ABE8.8_ | 23 |
| | TACAGATCTCA | | GUACAGAUCUC | | | SpCas9 | |
| | | | A | | | | |
| gRNA1814 | TTACCTGGTACA | 816 | UUACCUGGUAC | 844 | gRNA661 | ABE8.8_ | 19 |
| | GATCTCA | | AGAUCUCA | | | SpCas9 | |
| gRNA1815 | CCCGCAGATCTG | 817 | CCCGCAGAUCU | 845 | gRNA715 | ABE8.8_ | 21 |
| | GGACGTGGT | | GGGACGUGGU | | | SpCas9- | |
| | | | | | | VRQR | |
| gRNA1816 | CCCCGCAGATCT | 818 | CCCCGCAGAUC | 846 | gRNA715 | ABE8.8_ | 22 |
| | GGGACGTGGT | | UGGGACGUGGU | | | SpCas9- | |
| | | | | | | VRQR | |
| gRNA1817 | CCCCCGCAGATC | 819 | CCCCCGCAGAU | 847 | gRNA715 | ABE8.8_ | 23 |
| | TGGGACGTGGT | | CUGGGACGUGG | | | SpCas9- | |
| | | | U | | | VRQR | |
| gRNA1818 | CGCAGATCTGGG | 820 | CGCAGAUCUGG | 848 | gRNA715 | ABE8.8_ | 19 |
| | ACGTGGT | | GACGUGGU | | | SpCas9- | |
| | | | | | | VRQR | |
| gRNA1819 | TATCCAGGTACC | 821 | UAUCCAGGUAC | 849 | gRNA695 | ABE8.8_ | 21 |
| | GGGGAGACC | | CGGGGAGACC | | | SpCas9 | |
| gRNA1820 | CTATCCAGGTAC | 822 | CUAUCCAGGUA | 850 | gRNA695 | ABE8.8_ | 22 |
| | CGGGGAGACC | | CCGGGGAGACC | | | SpCas9 | |
| gRNA1821 | ACTATCCAGGTA | 823 | ACUAUCCAGGU | 851 | gRNA695 | ABE8.8_ | 23 |
| | CCGGGGAGACC | | ACCGGGGAGAC | | | SpCas9 | |
| | | | C | | | | |
| gRNA1822 | TCCAGGTACCGG | 824 | UCCAGGUACCG | 852 | gRNA695 | ABE8.8_ | 19 |
| | GGAGACC | | GGGAGACC | | | SpCas9 | |

TABLE 1D
List of C3 knock-out (KO) heavy modified guides screened
in FRG (Fah-/-Rag2-/-I12rg-/-) liver-humanized mice,
including the protospacer sequences, the spacer sequences,
the associated end-modified guide name, the editor(s)
associated with each, and the chemical modification scheme.

| | | SEQ | | SEQ | Associated | | Chemical |
|---|---|---|---|---|---|---|---|
| | Proto- | ID | | ID | End-mod | | modification |
| Guide | spacer | NO | Spacer | NO | Guide | Editor | scheme |
| gRNA2202 | TGGTACCG | 862 | UGGUACCGG | 876 | gRNA676 | ABE8.8_ | HM01 |
| | GAATGCGC | | AAUGCGCUU | | | SpCas9 | |
| | TTGA | | GA | | | | |
| gRNA2203 | TGGTACCG | 863 | UGGUACCGG | 877 | gRNA676 | ABE8.8_ | HM07 |
| | GAATGCGC | | AAUGCGCUU | | | SpCas9, | |
| | TTGA | | GA | | | ABE9.48_ | |
| | | | | | | SpCas9 | |
| gRNA2204 | TGGTACCG | 864 | UGGUACCGG | 878 | gRNA676 | ABE8.8_ | NLS |
| | GAATGCGC | | AAUGCGCUU | | | SpCas9 | |
| | TTGA | | GA | | | | |
| gRNA2205 | TGGTACCG | 865 | UGGUACCGG | 879 | gRNA676 | ABE8.8_ | LONGEST |
| | GAATGCGC | | AAUGCGCUU | | | SpCas9 | |
| | TTGA | | GA | | | | |
| gRNA2206 | CCGCAGAG | 866 | CCGCAGAGG | 880 | gRNA696 | ABE8.8_ | HM01 |
| | GAAAGCTG | | AAAGCUGUA | | | SpCas9 | |
| | TACC | | CC | | | | |
| gRNA2207 | CCGCAGAG | 867 | CCGCAGAGG | 881 | gRNA696 | ABE8.8_ | HM07 |
| | GAAAGCTG | | AAAGCUGUA | | | SpCas9 | |
| | TACC | | CC | | | | |
| gRNA2208 | CCGCAGAG | 868 | CCGCAGAGG | 882 | gRNA696 | ABE8.8_ | NLS |
| | GAAAGCTG | | AAAGCUGUA | | | SpCas9 | |
| | TACC | | CC | | | | |
| gRNA2209 | CCGCAGAG | 869 | CCGCAGAGG | 883 | gRNA696 | ABE8.8_ | LONGEST |
| | GAAAGCTG | | AAAGCUGUA | | | SpCas9 | |
| | TACC | | CC | | | | |
| gRNA3200 | TGGTACCG | 870 | UGGUACCGG | 884 | gRNA676 | ABE8.8_ | NLS + |
| | GAATGCGC | | AAUGCGCUU | | | SpCas9 | LONGEST |
| | TTGA | | GA | | | | |
| gRNA4229 | TGGTACCG | 871 | UGGUACCGG | 885 | gRNA676 | ABE9.48_ | LONGEST + |
| | GAATGCGC | | AAUGCGCUU | | | SpCas9^{‡} | GOLD |
| | TTGA | | GA | | | | |
| gRNA4231 | CTTACCTG | 872 | CUUACCUGG | 886 | gRNA661 | ABE9.52_ | HM07 |
| | GTACAGAT | | UACAGAUCU | | | SpCas9^{‡} | |
| | CTCA | | CA | | | | |
| gRNA4232 | CTTACCTG | 873 | CUUACCUGG | 887 | gRNA661 | ABE9.52_ | LONGEST + |
| | GTACAGAT | | UACAGAUCU | | | SpCas9^{‡} | GOLD |
| | CTCA | | CA | | | | |
| gRNA4233 | CCGCAGAT | 874 | CCGCAGAUC | 888 | gRNA715 | ABE8.13_ | HM07 |
| | CTGGGACG | | UGGGACGUG | | | SpCas9- | |
| | TGGT | | GU | | | VRQR | |
| gRNA4234 | CCGCAGAT | 875 | CCGCAGAUC | 889 | gRNA715 | ABE8.13_ | LONGEST + |
| | CTGGGACG | | UGGGACGUG | | | SpCas9- | GOLD |
| | TGGT | | GU | | | VRQR | |

^{‡}ABE9.48 indicates a base editor containing a TadA*9.48 deaminase domain corresponding to TadA*8.8 with the alterations V82T, Y147T, and Q154S; ABE9.52 indicates a base editor containing a TadA*9.52 deaminase domain corresponding to TadA*8.20 with the alterations V82T, Y147T, and Q154S.

TABLE 1E
List of heavy modified cyno surrogate C3 knock-out (KO)
guides, including the protospacer associated with each
guide, the associated human C3 KO guide, the editor(s)
associated with each, and the chemical modification scheme.

| | | | | | Associated | | Chemical |
|---|---|---|---|---|---|---|---|
| | | SEQ | | SEQ | End-mod | | Modific- |
| | Proto- | ID | | ID | Human | | ation |
| Guide | spacer | NO | Spacer | NO | Guide | Editor(s) | Scheme |
| gRNA2200 | TGCTACCTG | 890 | UGCUACCUG | 894 | gRNA676 | ABE8.8_ | HM01 |
| | GATGCGCTT | | GAUGCGCUU | | | SpCas9 | |
| | GA | | GA | | | | |
| gRNA2201 | CTGCAGCGG | 891 | CUGCAGCGG | 895 | gRNA696 | ABE8.8_ | HM01 |
| | AAAGCTGTA | | AAAGCUGUA | | | SpCas9 | |
| | CC | | CC | | | | |
| gRNA3201 | TGCTACCTG | 892 | UGCUACCUG | 896 | gRNA676 | ABE8.8_ | LONGEST |
| | GATGCGCTT | | GAUGCGCUU | | | SpCas9 | |
| | GA | | GA | | | | |
| gRNA3332 | TGCTACCTG | 893 | UGCUACCUG | 897 | gRNA676 | ABE8.8_ | HM07 |
| | GATGCGCTT | | GAUGCGCUU | | | SpCas9 | |
| | GA | | GA | | | | |

TABLE 1F
List of start codon-targeting and TATA box (e.g., −80 to −98 bp
upstream from the start codon of C3)-targeting C3 knock-out (KO)
guides screened in Hek293T cells, including the associated proto-
spacer regions, the editor(s) associated with each, and the
mechanism for KO generation.

| | | SEQ | | SEQ | | |
|---|---|---|---|---|---|---|
| | | ID | | ID | | |
| Guide | Protospacer | NO | Spacer | NO | Editor(s) | Mechanism |
| gRNA3341 | CCATGGTGCTGG | 898 | CCAUGGUGC | 919 | ABE8.8_SpCas9 | Start Codon |
| | GACAGTGC | | UGGGACAGU | | | |
| | | | GC | | | |
| gRNA3342 | AGCACCATGGGA | 899 | AGCACCAUG | 920 | ABE8.8_SpCas9 | Start Codon |
| | CCCACCTC | | GGACCCACC | | | |
| | | | UC | | | |
| gRNA3343 | GTCCCATGGTGC | 900 | GUCCCAUGG | 921 | ABE8.20_SpCas9- | Start Codon |
| | TGGGACAG | | UGCUGGGAC | | MQKFRAER, | |
| | | | AG | | ppAPOBEC1_ | |
| | | | | | SpCas9- | |
| | | | | | MQKFRAER | |
| gRNA3344 | TCCCATGGTGCT | 901 | UCCCAUGGU | 922 | BE4_SaCas9 | Start Codon |
| | GGGACAGTG | | GCUGGGACA | | | |
| | | | GUG | | | |
| gRNA3345 | AGGTGGGTCCCA | 902 | AGGUGGGUC | 923 | ABE8.8_SaCas9- | Start Codon |
| | TGGTGCTGG | | CCAUGGUGC | | KKH, | |
| | | | UGG | | BE4_SaCas9- | |
| | | | | | KKH | |
| gRNA3346 | CCCAGCACCATG | 903 | CCCAGCACC | 924 | ABE8.8_SaCas9- | Start Codon |
| | GGACCCACC | | AUGGGACCC | | KKH | |
| | | | ACC | | | |
| gRNA3347 | TGAGGTGGGTCC | 904 | UGAGGUGGG | 925 | ABE8.20_IBE16_ | Start Codon |
| | CATGGTGC | | UCCCAUGGU | | SpCas9 | |
| | | | GC | | | |
| gRNA3348 | GAGGTGGGTCCC | 905 | GAGGUGGGU | 926 | ABE8.20_IBE16_ | Start Codon |
| | ATGGTGCT | | CCCAUGGUG | | SpCas9 | |
| | | | CU | | | |
| gRNA3349 | AGGTGGGTCCCA | 906 | AGGUGGGUC | 927 | ABE8.20_IBE16_ | Start Codon |
| | TGGTGCTG | | CCAUGGUGC | | SpCas9-VRQR | |
| | | | UG | | | |
| gRNA3350 | GCTGGAGCTGGC | 907 | GCUGGAGCU | 928 | ABE8.8_SpCas9, | TATA box |
| | TTTTTATC | | GGCUUUUUA | | BE4_Sp-Cas9 | |
| | | | UC | | | |
| gRNA3351 | GATAAAAAGCCA | 908 | GAUAAAAAG | 929 | ABE8.8_SpCas9, | TATA box |
| | GCTCCAGC | | CCAGCUCCA | | BE4_Sp-Cas9 | |
| | | | GC | | | |
| gRNA3352 | CTGGAGCTGGCT | 909 | CUGGAGCUG | 930 | ABE8.20_SpCas9- | TATA box |
| | TTTTATCT | | GCUUUUUAU | | MQKFRAER, | |
| | | | CU | | ppAPOBEC1_ | |
| | | | | | SpCas9- | |
| | | | | | MQKFRAER | |
| gRNA3353 | CTGGCTTTTTAT | 910 | CUGGCUUUU | 931 | ABE8.20_SpCas9- | TATA box |
| | CTGGCTCC | | UAUCUGGCU | | MQKFRAER, | |
| | | | CC | | ppAPOBEC1_ | |
| | | | | | SpCas9- | |
| | | | | | MQKFRAER | |
| gRNA3354 | CTCCTGCCTTTC | 911 | CUCCUGCCU | 932 | ABE8.20_SpCas9- | TATA box |
| | CCCCACTC | | UUCCCCCAC | | MQKFRAER | |
| | | | UC | | | |
| gRNA3355 | AAGGCAGGAGCC | 912 | AAGGCAGGA | 933 | ABE8.20_SpCas9- | TATA box |
| | AGATAAAA | | GCCAGAUAA | | MQKFRAER, | |
| | | | AA | | ppAPOBEC1_ | |
| | | | | | SpCas9- | |
| | | | | | MQKFRAER | |
| gRNA3356 | CAGGAGCCAGAT | 913 | CAGGAGCCA | 934 | ABE8.20_SpCas9- | TATA box |
| | AAAAAGCC | | GAUAAAAAG | | MQKFRAER, | |
| | | | CC | | ppAPOBEC1_ | |
| | | | | | SpCas9- | |
| | | | | | MQKFRAER | |
| gRNA3357 | CCAGATAAAAAG | 914 | CCAGAUAAA | 935 | ABE8.20_SpCas9- | TATA box |
| | CCAGCTCC | | AAGCCAGCU | | MQKFRAER, | |
| | | | CC | | ppAPOBEC1_ | |
| | | | | | SpCas9- | |
| | | | | | MQKFRAER | |
| gRNA3358 | ATAAAAAGCCAG | 915 | AUAAAAAGC | 936 | ABE8.20_SpCas9- | TATA box |
| | CTCCAGCA | | CAGCUCCAG | | MQKFRAER, | |
| | | | CA | | ppAPOBEC1_ | |
| | | | | | SpCas9- | |
| | | | | | MQKFRAER | |
| gRNA3359 | AAAAAGCCAGCT | 916 | AAAAAGCCA | 937 | ABE8.20_SpCas9- | TATA box |
| | CCAGCAGG | | GCUCCAGCA | | MQKFRAER, | |
| | | | GG | | ppAPOBEC1_ | |
| | | | | | SpCas9- | |
| | | | | | MQKFRAER | |
| gRNA3360 | AAGCCAGCTCCA | 917 | AAGCCAGCU | 938 | ABE8.20_SpCas9- | TATA box |
| | GCAGGCGC | | CCAGCAGGC | | MQKFRAER, | |
| | | | GC | | ppAPOBEC1_ | |
| | | | | | SpCas9- | |
| | | | | | MQKFRAER | |
| gRNA3361 | GTGGGGGAAAGG | 918 | GUGGGGGAA | 939 | ABE8.20_IBE16_ | TATA box |
| | CAGGAGCC | | AGGCAGGAG | | SpCas9 | |
| | | | CC | | | |

TABLE 2
List of C3 mutant guides screened in Hek293T cells, the
protospacer, the spacer, the editor(s) associated with
each, the target residue, and the strategy for C3
functional disruption.

| | | SEQ | | SEQ | | | |
|---|---|---|---|---|---|---|---|
| | Proto- | ID | | ID | Mutated | | |
| Guide | spacer | NO | Spacer | NO | Residue(s) | Editor(s) | Mechanism |
| gRNA820 | CTGTTCCCCG | 754 | CUGUUCCCCG | 773 | C1010R; | ABE8.8_ | Ops. |
| | CAGCCCGAGG | | CAGCCCGAGG | | C1010Y | SpCas9, | cysteine |
| | | | | | | BE4_SpCas9 | |
| gRNA821 | ATCATTTCTT | 755 | AUCAUUUCUU | 774 | E1128K | BE4_SpCas9 | Ops. |
| | GGTGTATCAC | | GGUGUAUCAC | | | | cysteine |
| | | | | | | | partner |
| gRNA822 | CACCAAGAAA | 756 | CACCAAGAAA | 775 | E1128G | ABE8.8_ | Ops. |
| | TGATTGTAAG | | UGAUUGUAAG | | | SpCas9 | cysteine |
| | | | | | | | partner |
| gRNA823 | AAGAAATGAT | 757 | AAGAAAUGAU | 776 | E1128G | ABE8.8_ | Ops. |
| | TGTAAGAGGC | | UGUAAGAGGC | | | SpCas9 | cysteine |
| | | | | | | | partner |
| gRNA824 | GCGGGCCAGC | 758 | GCGGGCCAGC | 777 | A741V | BE4_SpCas9 | Convertase |
| | CACCTGGGCC | | CACCUGGGCC | | | | cleavage |
| gRNA825 | CCAGCCACCT | 759 | CCAGCCACCU | 778 | H743R; | ABE8.8_ | Convertase |
| | GGGCCTGGCC | | GGGCCUGGCC | | H743Y | SpCas9, | cleavage |
| | | | | | | BE4_SpCas9 | |
| gRNA827 | CTGGCCAGGA | 760 | CUGGCCAGGA | 779 | R748G; | ABE8.8_ | Convertase |
| | GTAGGTCCCA | | GUAGGUCCCA | | A747V | SpCas9, | cleavage |
| | | | | | | BE4_SpCas9 | |
| gRNA828 | TGGCCAGGAG | 761 | UGGCCAGGAG | 780 | R748G; | ABE8.8_ | Convertase |
| | TAGGTCCCAC | | UAGGUCCCAC | | A747V | SpCas9, | cleavage |
| | | | | | | BE4_SpCas9 | |
| gRNA829 | GGCCAGGAGT | 762 | GGCCAGGAGU | 781 | R748G, | ABE8.8_ | Convertase |
| | AGGTCCCACG | | AGGUCCCACG | | S749G; | SpCas9, | cleavage |
| | | | | | A747V | BE4_SpCas9 | |
| gRNA830 | CCTGGCCAGG | 763 | CCUGGCCAGG | 782 | L746P; | ABE8.8_ | Convertase |
| | CCCAGGTGGC | | CCCAGGUGGC | | A747T, | SpCas9, | cleavage |
| | | | | | R748K | BE4_SpCas9 | |
| gRNA837 | GGAACAGAAC | 764 | GGAACAGAAC | 783 | Q1013R; | ABE8.8_ | Ops. |
| | ATGATCGGCA | | AUGAUCGGCA | | Q1013Stop | SpCas9-VRQR, | cysteine |
| | | | | | | BE4_SpCas9- | partner |
| | | | | | | VRQR | |
| gRNA838 | TACACCAAGA | 765 | UACACCAAGA | 784 | H1126R; | ABE8.8_ | Needed |
| | AATGATTGTA | | AAUGAUUGUA | | H1126Y | SpCas9-VRQR, | for ops. |
| | | | | | | BE4_SpCas9- | cysteine |
| | | | | | | VRQR | intermediate |
| gRNA839 | CAGCCACCTG | 766 | CAGCCACCUG | 785 | H743R; | ABE8.8_ | Convertase |
| | GGCCTGGCCA | | GGCCUGGCCA | | H743Y | SpCas9-VRQR, | cleavage |
| | | | | | | BE4_SpCas9- | |
| | | | | | | VRQR | |
| gRNA844 | TTCCCCGCAG | 767 | UUCCCCGCAG | 786 | C1010R; | ABE8.8_ | Ops. |
| | CCCGAGGGGG | | CCCGAGGGGG | | C1010Y | SaCas9-KKH, | cysteine |
| | T | | U | | | BE4_SaCas9- | |
| | | | | | | KKH | |
| gRNA845 | GCCACCTGGG | 768 | GCCACCUGGG | 787 | H743R | ABE8.8_ | Convertase |
| | CCTGGCCAGG | | CCUGGCCAGG | | | SaCas9-KKH, | cleavage |
| | A | | A | | | BE4_SaCas9- | |
| | | | | | | KKH | |
| gRNA849 | GTTCTGTTCC | 769 | GUUCUGUUCC | 788 | C1010R; | ABE8.8_ | Ops. |
| | CCGCAGCCCG | | CCGCAGCCCG | | C1010Y | SaCas9, | cysteine |
| | A | | A | | | BE4_SaCas9 | |
| gRNA850 | CAAGAAATGA | 770 | CAAGAAAUGA | 789 | E1128G | ABE8.8_ | Ops. |
| | TTGTAAGAGG | | UUGUAAGAGG | | | SaCas9 | cysteine |
| | C | | C | | | | partner |
| gRNA851 | GCCAGCCACC | 771 | GCCAGCCACC | 790 | H743R, | ABE8.8_ | Convertase |
| | TGGGCCTGGC | | UGGGCCUGGC | | S742G; | SaCas9, | cleavage |
| | C | | C | | H743Y | BE4_SaCas9 | |
| gRNA852 | CCTGGCCAGG | 772 | CCUGGCCAGG | 791 | R748G, | ABE8.8_ | Convertase |
| | AGTAGGTCCC | | AGUAGGUCCC | | S749G; | SaCas9, | cleavage |
| | A | | A | | A747V | BE4_SaCas9 | |

Ops.—Opsonizing.

### Nucleobase Editors

[0224] Useful in the methods and compositions described herein are nucleobase editors that edit, modify or alter a target nucleotide sequence of a polynucleotide. Nucleobase editors described herein typically include a polynucleotide programmable nucleotide binding domain and a nucleobase editing domain (e.g., adenosine deaminase, cytidine deaminase, or a dual deaminase). A polynucleotide programmable nucleotide binding domain, when in conjunction with a bound guide polynucleotide (e.g., gRNA), can specifically bind to a target polynucleotide sequence and thereby localize the base editor to the target nucleic acid sequence desired to be edited.

### Polynucleotide Programmable Nucleotide Binding Domain

[0225] Polynucleotide programmable nucleotide binding domains bind polynucleotides (e.g., RNA, DNA). A polynucleotide programmable nucleotide binding domain of a base editor can itself comprise one or more domains (e.g., one or more nuclease domains). In some embodiments, the nuclease domain of a polynucleotide programmable nucleotide binding domain comprises an endonuclease or an exonuclease.

[0226] Disclosed herein are base editors comprising a polynucleotide programmable nucleotide binding domain comprising all or a portion (e.g., a functional portion) of a CRISPR protein (i.e., a base editor comprising as a domain all or a portion (e.g., a functional portion) of a CRISPR protein (e.g., a Cas protein), also referred to as a “CRISPR protein-derived domain” of the base editor). A CRISPR protein-derived domain incorporated into a base editor can be modified compared to a wild-type or natural version of the CRISPR protein. A CRISPR protein-derived domain can comprise one or more mutations, insertions, deletions, rearrangements and/or recombinations relative to a wild-type or natural version of the CRISPR protein.

[0227] Cas proteins that can be used herein include class 1 and class 2. Non-limiting examples of Cas proteins include Cas1, Cas1B, Cas2, Cas3, Cas4, Cas5, Cas5d, Cas5t, Cas5h, Cas5a, Cas6, Cas7, Cas8, Cas9 (also known as Csn1 or Csx12), Cas10, Csy1, Csy2, Csy3, Csy4, Cse1, Cse2, Cse3, Cse4, Cse5e, Csc1, Csc2, Csa5, Csn1, Csn2, Csm1, Csm2, Csm3, Csm4, Csm5, Csm6, Cmr1, Cmr3, Cmr4, Cmr5, Cmr6, Csb1, Csb2, Csb3, Csx17, Csx14, Csx10, Csx16, CsaX, Csx3, Csx1, Csx1S, Csf1, Csf2, CsO, Csf4, Csd1, Csd2, Cst1, Cst2, Csh1, Csh2, Csa1, Csa2, Csa3, Csa4, Csa5, Cas12a/Cpfl, Cas12b/C2cl (e.g., SEQ ID NO: 232), Cas12c/C2c3, Cas12d/CasY, Cas12e/CasX, Cas12g, Cas12h, Cas12i, and Cas12j/CasΦ, CARF, DinG, homologues thereof, or modified versions thereof. A CRISPR enzyme can direct cleavage of one or both strands at a target sequence, such as within a target sequence and/or within a complement of a target sequence. For example, a CRISPR enzyme can direct cleavage of one or both strands within about 1, 2, 3, 4, 5, 6, 7, 8, 9, 10, 15, 20, 25, 50, 100, 200, 500, or more base pairs from the first or last nucleotide of a target sequence.

[0228] A vector that encodes a CRISPR enzyme that is mutated to with respect to a corresponding wild-type enzyme such that the mutated CRISPR enzyme lacks the ability to cleave one or both strands of a target polynucleotide containing a target sequence can be used. A Cas protein (e.g., Cas9, Cas12) or a Cas domain (e.g., Cas9, Cas12) can refer to a polypeptide or domain with at least or at least about 50%, 60%, 70%, 80%, 90%, 91%, 92%, 93%, 94%, 95%, 96%, 97%, 98%, 99%, or 100% sequence identity and/or sequence homology to a wild-type exemplary Cas polypeptide or Cas domain. Cas (e.g., Cas9, Cas12) can refer to the wild-type or a modified form of the Cas protein that can comprise an amino acid change such as a deletion, insertion, substitution, variant, mutation, fusion, chimera, or any combination thereof.

[0229] In some embodiments, a CRISPR protein-derived domain of a base editor can include all or a portion (e.g., a functional portion) of Cas9 from Corynebacterium ulcerans (NCBI Refs: NC_015683.1, NC_017317.1); Corynebacterium diphtheria (NCBI Refs: NC_016782.1, NC_016786.1); Spiroplasma syrphidicola (NCBI Ref: NC_021284.1); Prevotella intermedia (NCBI Ref: NC_017861.1); Spiroplasma taiwanense (NCBI Ref: NC_021846.1); Streptococcus iniae (NCBI Ref: NC_021314.1); Belliella baltica (NCBI Ref: NC_018010.1); Psychroflexus torquis (NCBI Ref: NC_018721.1); Streptococcus thermophilus (NCBI Ref: YP_820832.1); Listeria innocua (NCBI Ref: NP_472073.1); Campylobacter jejuni (NCBI Ref: YP_002344900.1); Neisseria meningitidis (NCBI Ref: YP_002342100.1), Streptococcus pyogenes, or Staphylococcus aureus.

[0230] Some aspects of the disclosure provide high fidelity Cas9 domains. High fidelity Cas9 domains are known in the art and described, for example, in Kleinstiver, B. P., et al. “High-fidelity CRISPR-Cas9 nucleases with no detectable genome-wide off-target effects.” Nature 529, 490-495 (2016); and Slaymaker, I. M., et al. “Rationally engineered Cas9 nucleases with improved specificity.” Science 351, 84-88 (2015); the entire contents of each of which are incorporated herein by reference. An Exemplary high fidelity Cas9 domain is provided in the Sequence Listing as SEQ ID NO: 233.

[0231] In some embodiments, any of the Cas9 fusion proteins or complexes provided herein comprise one or more of a D10A, N497X, a R661X, a Q695X, and/or a Q926X mutation, or a corresponding mutation in any of the amino acid sequences provided herein, wherein X is any amino acid.

[0232] Typically, Cas9 proteins, such as Cas9 from S. pyogenes (spCas9), require a “protospacer adjacent motif (PAM)” or PAM-like motif, which is a 2-6 base pair DNA sequence immediately following the DNA sequence targeted by the Cas9 nuclease in the CRISPR bacterial adaptive immune system. The presence of an NGG PAM sequence is required to bind a particular nucleic acid region, where the “N” in “NGG” is adenosine (A), thymidine (T), or cytosine (C), and the G is guanosine. In some embodiments, any of the fusion proteins or complexes provided herein may contain a Cas9 domain that is capable of binding a nucleotide sequence that does not contain a canonical (e.g., NGG) PAM sequence. Cas9 domains that bind to non-canonical PAM sequences have been described in the art and would be apparent to the skilled artisan. For example, Cas9 domains that bind non-canonical PAM sequences have been described in Kleinstiver, B. P., et al., “Engineered CRISPR-Cas9 nucleases with altered PAM specificities” Nature 523, 481-485 (2015); and Kleinstiver, B. P., et al., “Broadening the targeting range of Staphylococcus aureus CRISPR-Cas9 by modifying PAM recognition” Nature Biotechnology 33, 1293-1298 (2015); the entire contents of each are hereby incorporated by reference.

[0233] In some embodiments, the napDNAbp is a circular permutant (e.g., SEQ ID NO: 238).

[0234] In some embodiments, the polynucleotide programmable nucleotide binding domain comprises a nickase domain. Herein the term “nickase” refers to a polynucleotide programmable nucleotide binding domain comprising a nuclease domain that is capable of cleaving only one strand of the two strands in a duplexed nucleic acid molecule (e.g., DNA). For example, where a polynucleotide programmable nucleotide binding domain comprises a nickase domain derived from Cas9, the Cas9-derived nickase domain can include a D10A mutation and a histidine at position 840. In another example, a Cas9-derived nickase domain comprises an H840A mutation, while the amino acid residue at position 10 remains a D.

[0235] In some embodiments, a Cas9 nuclease has an inactive (e.g., an inactivated) DNA cleavage domain, that is, the Cas9 is a nickase, referred to as an “nCas9” protein (for “nickase” Cas9; SEQ ID NO: 201). The Cas9 nickase may be a Cas9 protein that is capable of cleaving only one strand of a duplexed nucleic acid molecule (e.g., a duplexed DNA molecule). In some embodiments the Cas9 nickase comprises an amino acid sequence that is at least 60%, at least 65%, at least 70%, at least 75%, at least 80%, at least 85%, at least 90%, at least 95%, at least 96%, at least 97%, at least 98%, at least 99%, or at least 99.5% identical to any one of the Cas9 nickases provided herein. Additional suitable Cas9 nickases will be apparent to those of skill in the art based on this disclosure and knowledge in the field and are within the scope of this disclosure.

[0236] Also provided herein are base editors comprising a polynucleotide programmable nucleotide binding domain which is catalytically dead (i.e., incapable of cleaving a target polynucleotide sequence). For example, in the case of a base editor comprising a Cas9 domain, the Cas9 can comprise both a D10A mutation and an H840A mutation. In further embodiments, a catalytically dead polynucleotide programmable nucleotide binding domain comprises a point mutation (e.g., D10A or H840A) as well as a deletion of all or a portion (e.g., a functional portion) of a nuclease domain. dCas9 domains are known in the art and described, for example, in Qi et al., “Repurposing CRISPR as an RNA-guided platform for sequence-specific control of gene expression.” Cell. 2013; 152(5):1173-83, the entire contents of which are incorporated herein by reference.

[0237] The term “protospacer adjacent motif (PAM)” or PAM-like motif refers to a 2-6 base pair DNA sequence immediately following the DNA sequence targeted by a nucleic acid programmable DNA binding protein. In some embodiments, the PAM can be a 5′ PAM (i.e., located upstream of the 5′ end of the protospacer). In other embodiments, the PAM can be a 3′ PAM (i.e., located downstream of the 5′ end of the protospacer). The PAM sequence can be any PAM sequence known in the art. Suitable PAM sequences include, but are not limited to, NGG, NGA, NGC, NGN, NGT, NGTT, NGCG, NGAG, NGAN, NGNG, NGCN, NGCG, NGTN, NNGRRT, NNNRRT, NNGRR(N), TTTV, TYCV, TYCV, TATV, NNNNGATT, NNAGAAW, or NAAAAC. Y is a pyrimidine; N is any nucleotide base; W is A or T.

[0238] A base editor provided herein can comprise a CRISPR protein-derived domain that is capable of binding a nucleotide sequence that contains a canonical or non-canonical protospacer adjacent motif (PAM) sequence.

[0239] In some embodiments, the PAM is an “NRN” PAM where the “N” in “NRN” is adenine (A), thymine (T), guanine (G), or cytosine (C), and the R is adenine (A) or guanine (G); or the PAM is an “NYN” PAM, wherein the “N” in NYN is adenine (A), thymine (T), guanine (G), or cytosine (C), and the Y is cytidine (C) or thymine (T), for example, as described in R.T. Walton et al., 2020, Science, 10.1126/science.aba8853 (2020), the entire contents of which are incorporated herein by reference.

[0240] Several PAM variants are described in Table 3 below.

TABLE 3
Cas9 proteins and corresponding PAM sequences. N
is A, C, T, or G; and V is A, C, or G.

| | |
|---|---|
| Variant | PAM |
| spCas9 | NGG |
| spCas9-VRQR | NGA |
| Variant | PAM |
| spCas9-VRER | NGCG |
| xCas9 (sp) | NGN |
| saCas9 | NNGRRT |
| saCas9-KKH | NNNRRT |
| spCas9-MQKSER | NGCG |
| spCas9-MQKSER | NGCN |
| spCas9-LRKIQK | NGTN |
| spCas9-LRVSQK | NGTN |
| spCas9-LRVSQL | NGTN |
| spCas9-MQKFRAER | NGC |
| Cpf1 | 5′ (TTTV) |
| SpyMac | 5′-NAA-3′ |

[0241] In some embodiments, the PAM is NGC. In some embodiments, the NGC PAM is recognized by a Cas9 variant. In some embodiments, the NGC PAM Cas9 variant includes one or more amino acid substitutions selected from D1135M, S1136Q, G1218K, E1219F, A1322R, D1332A, R1335E, and T1337R (collectively termed “MQKFRAER”) of spCas9 (SEQ ID No: 197), or a corresponding mutation in another Cas9. In some embodiments, the Cas9 variant contains one or more amino acid substitutions selected from D1135V, G1218R, R1335Q, and T1337R (collectively termed VRQR) of spCas9 (SEQ ID No: 197), or a corresponding mutation in another Cas9. In some embodiments, the Cas9 variant contains one or more amino acid substitutions selected from D1135V, G1218R, R1335E, and T1337R (collectively termed VRER) of spCas9 (SEQ ID No: 197), or a corresponding mutation in another Cas9. In some embodiments, the Cas9 variant contains one or more amino acid substitutions selected from E782K, N968K, and R1015H (collectively termed KHH) of saCas9 (SEQ ID NO: 218). In some embodiments, the Cas9 variant includes one or more amino acid substitutions selected from D1135M, S1136Q, G1218K, E1219S, R1335E, and T1337R (collectively termed “MQKSER”) of spCas9 (SEQ ID No: 197), or a corresponding mutation in another Cas9. In some embodiments, the Cas9 variant includes one or more amino acid substitutions selected from D1135M, S1136Q, G1218K, E1219S, R1335E, and T1337R (collectively termed “MQKSER”) of spCas9 (SEQ ID No: 197), or a corresponding mutation in another Cas9.

[0242] In some embodiments, a CRISPR protein-derived domain of a base editor comprises all or a portion (e.g., a functional portion) of a Cas9 protein with a canonical PAM sequence (NGG). In other embodiments, a Cas9-derived domain of a base editor can employ a non-canonical PAM sequence. Such sequences have been described in the art and would be apparent to the skilled artisan. For example, Cas9 domains that bind non-canonical PAM sequences have been described in Kleinstiver, B. P., et al., “Engineered CRISPR-Cas9 nucleases with altered PAM specificities” Nature 523, 481-485 (2015); and Kleinstiver, B. P., et al., “Broadening the targeting range of Staphylococcus aureus CRISPR-Cas9 by modifying PAM recognition” Nature Biotechnology 33, 1293-1298 (2015); R. T. Walton et al. “Unconstrained genome targeting with near-PAMless engineered CRISPR-Cas9 variants” Science 10.1126/science.aba8853 (2020); Hu et al. “Evolved Cas9 variants with broad PAM compatibility and high DNA specificity,” Nature, 2018 Apr. 5, 556(7699), 57-63; Miller et al., “Continuous evolution of SpCas9 variants compatible with non-G PAMs” Nat. Biotechnol., 2020 April; 38(4):471-481; the entire contents of each are hereby incorporated by reference.

Fusion Proteins or Complexes Comprising a NapDNAbp and a Cytidine Deaminase and/or Adenosine Deaminase

[0243] Some aspects of the disclosure provide fusion proteins or complexes comprising a Cas9 domain or other nucleic acid programmable DNA binding protein (e.g., Cas12) and one or more cytidine deaminase, adenosine deaminase, or cytidine adenosine deaminase domains. It should be appreciated that the Cas9 domain may be any of the Cas9 domains or Cas9 proteins (e.g., dCas9 or nCas9) provided herein. In some embodiments, any of the Cas9 domains or Cas9 proteins (e.g., dCas9 or nCas9) provided herein may be fused with any of the cytidine deaminases and/or adenosine deaminases provided herein. The domains of the base editors disclosed herein can be arranged in any order.

[0244] In some embodiments, the fusion proteins or complexes comprising a cytidine deaminase or adenosine deaminase and a napDNAbp (e.g., Cas9 or Cas12 domain) do not include a linker sequence. In some embodiments, a linker is present between the cytidine or adenosine deaminase and the napDNAbp. In some embodiments, cytidine or adenosine deaminase and the napDNAbp are fused via any of the linkers provided herein. For example, in some embodiments the cytidine or adenosine deaminase and the napDNAbp are fused via any of the linkers provided herein.

[0245] It should be appreciated that the fusion proteins or complexes of the present disclosure may comprise one or more additional features. For example, in some embodiments, the fusion protein or complex may comprise inhibitors, cytoplasmic localization sequences, export sequences, such as nuclear export sequences, or other localization sequences, as well as sequence tags that are useful for solubilization, purification, or detection of the fusion proteins or complexes. Suitable protein tags provided herein include, but are not limited to, biotin carboxylase carrier protein (BCCP) tags, myc-tags, calmodulin-tags, FLAG-tags, hemagglutinin (HA)-tags, polyhistidine tags, also referred to as histidine tags or His-tags, maltose binding protein (MBP)-tags, nus-tags, glutathione-S-transferase (GST)-tags, green fluorescent protein (GFP)-tags, thioredoxin-tags, S-tags, Softags (e.g., Softag 1, Softag 3), strep-tags, biotin ligase tags, FlAsH tags, V5 tags, and SBP-tags. Additional suitable sequences will be apparent to those of skill in the art. In some embodiments, the fusion protein or complex comprises one or more His tags.

[0246] Exemplary, yet nonlimiting, fusion proteins are described in International PCT Application Nos. PCT/US2017/045381, PCT/US2019/044935, and PCT/US2020/016288, each of which is incorporated herein by reference for its entirety.

Fusion Proteins or Complexes with Internal Insertions

[0247] Provided herein are fusion proteins or complexes comprising a heterologous polypeptide fused to a nucleic acid programmable nucleic acid binding protein, for example, a napDNAbp. The heterologous polypeptide can be fused to the napDNAbp at a C-terminal end of the napDNAbp, an N-terminal end of the napDNAbp, or inserted at an internal location of the napDNAbp. In some embodiments, the heterologous polypeptide is a deaminase (e.g., cytidine or adenosine deaminase) or a functional fragment thereof. For example, a fusion protein can comprise a deaminase flanked by an N-terminal fragment and a C-terminal fragment of a Cas9 or Cas12 (e.g., Cas12b/C2cl), polypeptide.

[0248] The deaminase can be a circular permutant deaminase. In some embodiments, the deaminase is a circular permutant TadA, circularly permutated at amino acid residue 116, 136, or 65 as numbered in a TadA reference sequence.

[0249] The fusion protein or complexes can comprise more than one deaminase. The fusion protein or complex can comprise, for example, 1, 2, 3, 4, 5 or more deaminases. The deaminases in a fusion protein or complex can be adenosine deaminases, cytidine deaminases, or a combination thereof.

[0250] In some embodiments, the napDNAbp in the fusion protein or complex contains a Cas9 polypeptide or a fragment thereof. The Cas9 polypeptide can be a variant Cas9 polypeptide. The Cas9 polypeptide can be a circularly permuted Cas9 protein.

[0251] The heterologous polypeptide (e.g., deaminase) can be inserted in the napDNAbp (e.g., Cas9 or Cas12 (e.g., Cas12b/C2cl)) at a suitable location, for example, such that the napDNAbp retains its ability to bind the target polynucleotide and a guide nucleic acid. A deaminase (e.g., adenosine deaminase, cytidine deaminase, or adenosine deaminase and cytidine deaminase (dual deaminase)) can be inserted into a napDNAbp without compromising function of the deaminase (e.g., base editing activity) or the napDNAbp (e.g., ability to bind to target nucleic acid and guide nucleic acid).

[0252] In some embodiments, the deaminase (e.g., adenosine deaminase, cytidine deaminase, or adenosine deaminase and cytidine deaminase) is inserted in regions of the Cas9 polypeptide comprising higher than average B-factors (e.g., higher B factors compared to the total protein or the protein domain comprising the disordered region). Cas9 polypeptide positions comprising a higher than average B-factor can include, for example, residues 768, 792, 1052, 1015, 1022, 1026, 1029, 1067, 1040, 1054, 1068, 1246, 1247, and 1248 as numbered in the above Cas9 reference sequence. Cas9 polypeptide regions comprising a higher than average B-factor can include, for example, residues 792-872, 792-906, and 2-791 as numbered in the above Cas9 reference sequence.

[0253] In some embodiments, a heterologous polypeptide (e.g., deaminase) is inserted in a flexible loop of a Cas9 polypeptide. The flexible loop portions can be selected from the group consisting of 530-537, 569-570, 686-691, 943-947, 1002-1025, 1052-1077, 1232-1247, or 1298-1300 as numbered in the above Cas9 reference sequence, or a corresponding amino acid residue in another Cas9 polypeptide. The flexible loop portions can be selected from the group consisting of: 1-529, 538-568, 580-685, 692-942, 948-1001, 1026-1051, 1078-1231, or 1248-1297 as numbered in the above Cas9 reference sequence, or a corresponding amino acid residue in another Cas9 polypeptide.

[0254] A heterologous polypeptide (e.g., adenine deaminase) can be inserted into a Cas9 polypeptide region corresponding to amino acid residues: 1017-1069, 1242-1247, 1052-1056, 1060-1077, 1002-1003, 943-947, 530-537, 568-579, 686-691, 1242-1247, 1298-1300, 1066-1077, 1052-1056, or 1060-1077 as numbered in the above Cas9 reference sequence, or a corresponding amino acid residue in another Cas9 polypeptide.

[0255] A heterologous polypeptide (e.g., adenine deaminase) can be inserted in place of a deleted region of a Cas9 polypeptide. The deleted region can correspond to an N-terminal or C-terminal portion of the Cas9 polypeptide. Exemplary internal fusions base editors are provided in Table 4A below:

TABLE 4A
Insertion loci in Cas9 proteins

| BE ID | Modification | Other ID |
|---|---|---|
| IBE001 | Cas9 TadA ins 1015 | ISLAY01 |
| IBE002 | Cas9 TadA ins 1022 | ISLAY02 |
| IBE003 | Cas9 TadA ins 1029 | ISLAY03 |
| IBE004 | Cas9 TadA ins 1040 | ISLAY04 |
| IBE005 | Cas9 TadA ins 1068 | ISLAY05 |
| IBE006 | Cas9 TadA ins 1247 | ISLAY06 |
| IBE007 | Cas9 TadA ins 1054 | ISLAY07 |
| IBE008 | Cas9 TadA ins 1026 | ISLAY08 |
| IBE009 | Cas9 TadA ins 768 | ISLAY09 |
| IBE020 | delta HNH TadA 792 | ISLAY20 |
| IBE021 | N-term fusion single TadA helix truncated 165-end | ISLAY21 |
| IBE029 | TadA-Circular Permutant 116 ins1067 | ISLAY29 |
| IBE031 | TadA- Circular Permutant 136 ins1248 | ISLAY31 |
| IBE032 | TadA- Circular Permutant 136ins 1052 | ISLAY32 |
| IBE035 | delta 792-872 TadA ins | ISLAY35 |
| IBE036 | delta 792-906 TadA ins | ISLAY36 |
| IBE043 | TadA-Circular Permutant 65 ins1246 | ISLAY43 |
| IBE044 | TadA ins C-term truncate2 791 | ISLAY44 |

[0256] A heterologous polypeptide (e.g., deaminase) can be inserted within a structural or functional domain of a Cas9 polypeptide. A heterologous polypeptide (e.g., deaminase) can be inserted between two structural or functional domains of a Cas9 polypeptide. A heterologous polypeptide (e.g., deaminase) can be inserted in place of a structural or functional domain of a Cas9 polypeptide, for example, after deleting the domain from the Cas9 polypeptide. The structural or functional domains of a Cas9 polypeptide can include, for example, RuvC I, RuvC II, RuvC III, Rec1, Rec2, PI, or HNH.

[0257] A fusion protein can comprise a linker between the deaminase and the napDNAbp polypeptide. The linker can be a peptide or a non-peptide linker. For example, the linker can be an XTEN, (GGGS)ₙ (SEQ ID NO: 246), SGGSSGGS (SEQ ID NO: 330), (GGGGS)ₙ (SEQ ID NO: 247), (G)ₙ, (EAAAK)n (SEQ ID NO: 248), (GGS)ₙ, SGSETPGTSESATPES (SEQ ID NO: 249). In some embodiments, the fusion protein comprises a linker between the N-terminal Cas9 fragment and the deaminase. In some embodiments, the fusion protein comprises a linker between the C-terminal Cas9 fragment and the deaminase. In some embodiments, the N-terminal and C-terminal fragments of napDNAbp are connected to the deaminase with a linker. In some embodiments, the N-terminal and C-terminal fragments are joined to the deaminase domain without a linker. In some embodiments, the fusion protein comprises a linker between the N-terminal Cas9 fragment and the deaminase but does not comprise a linker between the C-terminal Cas9 fragment and the deaminase. In some embodiments, the fusion protein comprises a linker between the C-terminal Cas9 fragment and the deaminase but does not comprise a linker between the N-terminal Cas9 fragment and the deaminase.

[0258] In some embodiments, the napDNAbp in the fusion protein or complex is a Cas12 polypeptide, e.g., Cas12b/C2cl, or a functional fragment thereof capable of associating with a nucleic acid (e.g., a gRNA) that guides the Cas12 to a specific nucleic acid sequence. The Cas12 polypeptide can be a variant Cas12 polypeptide. In other embodiments, the N- or C-terminal fragments of the Cas12 polypeptide comprise a nucleic acid programmable DNA binding domain or a RuvC domain. In other embodiments, the fusion protein contains a linker between the Cas12 polypeptide and the catalytic domain. In other embodiments, the amino acid sequence of the linker is GGSGGS (SEQ ID NO: 250) or GSSGSETPGTSESATPESSG (SEQ ID NO: 251). In other embodiments, the linker is a rigid linker. In other embodiments of the aspects of the disclosure, the linker is encoded by GGAGGCTCTGGAGGAAGC (SEQ ID NO: 252) or

(SEQ ID NO: 253)
GGCTCTTCTGGATCTGAAACACCTGGCACAAGCGAGAGCGCCACCCCTG
AGAGCTCTGGC.

[0259] In other embodiments, the fusion protein or complex contains a nuclear localization signal (e.g., a bipartite nuclear localization signal). In other embodiments, the amino acid sequence of the nuclear localization signal is MAPKKKRKVGIHGVPAA (SEQ ID NO: 261). In other embodiments of the aspects of the disclosure, the nuclear localization signal is encoded by the following sequence:

[0260] ATGGCCCCAAAGAAGAAGCGGAAGGTCGGTATCCACGGAGTCCCAGCAGCC (SEQ ID NO: 262). In other embodiments, the Cas12b polypeptide contains a mutation that silences the catalytic activity of a RuvC domain. In other embodiments, the Cas12b polypeptide contains D574A, D829A and/or D952A mutations.

[0261] In some embodiments, the fusion protein or complex comprises a napDNAbp domain (e.g., Cas12-derived domain) with an internally fused nucleobase editing domain (e.g., all or a portion (e.g., a functional portion) of a deaminase domain, e.g., an adenosine deaminase domain). In some embodiments, the napDNAbp is a Cas12b. In some embodiments, the base editor comprises a BhCas12b domain with an internally fused TadA*8 domain inserted at the loci provided in Table 4B below.

TABLE 4B
Insertion loci in Cas12b proteins

| | Insertion site | Inserted between aa |
|---|---|---|
| BhCas12b | | |
| position 1 | 153 | PS |
| position 2 | 255 | KE |
| position 3 | 306 | DE |
| position 4 | 980 | DG |
| position 5 | 1019 | KL |
| position 6 | 534 | FP |
| position 7 | 604 | KG |
| position 8 | 344 | HF |
| BvCas12b | | |
| position 1 | 147 | PD |
| position 2 | 248 | GG |
| position 3 | 299 | PE |
| position 4 | 991 | GE |
| position 5 | 1031 | KM |
| AaCas12b | | |
| position 1 | 157 | PG |
| position 2 | 258 | VG |
| position 3 | 310 | DP |
| position 4 | 1008 | GE |
| position 5 | 1044 | GK |

[0262] In some embodiments, the base editing system described herein is an ABE with TadA inserted into a Cas9. Polypeptide sequences of relevant ABEs with TadA inserted into a Cas9 are provided in the attached Sequence Listing as SEQ ID NOs: 263-308.

[0263] Exemplary, yet nonlimiting, fusion proteins are described in International PCT Application Nos. PCT/US2020/016285 and U.S. Provisional Application Nos. 62/852,228 and 62/852,224, the contents of which are incorporated by reference herein in their entireties.

### A to G Editing

[0264] In some embodiments, a base editor described herein comprises an adenosine deaminase domain. Such an adenosine deaminase domain of a base editor can facilitate the editing of an adenine (A) nucleobase to a guanine (G) nucleobase by deaminating the A to form inosine (I), which exhibits base pairing properties of G. In some embodiments, an A-to-G base editor further comprises an inhibitor of inosine base excision repair, for example, a uracil glycosylase inhibitor (UGI) domain or a catalytically inactive inosine specific nuclease. Without wishing to be bound by any particular theory, the UGI domain or catalytically inactive inosine specific nuclease can inhibit or prevent base excision repair of a deaminated adenosine residue (e.g., inosine), which can improve the activity or efficiency of the base editor.

[0265] A base editor comprising an adenosine deaminase can act on any polynucleotide, including DNA, RNA and DNA-RNA hybrids. In an embodiment an adenosine deaminase domain of a base editor comprises all or a portion (e.g., a functional portion) of an ADAT comprising one or more mutations which permit the ADAT to deaminate a target A in DNA. For example, the base editor can comprise all or a portion (e.g., a functional portion) of an ADAT from Escherichia coli (EcTadA) comprising one or more of the following mutations: D108N, A106V, D147Y, E155V, L84F, H123Y, I156F, or a corresponding mutation in another adenosine deaminase. Exemplary ADAT homolog polypeptide sequences are provided in the Sequence Listing as SEQ ID NOs: 1 and 309-315.

[0266] The adenosine deaminase can be derived from any suitable organism (e.g., E. coli). In some embodiments, the adenosine deaminase is from Escherichia coli, Staphylococcus aureus, Salmonella typhi, Shewanella putrefaciens, Haemophilus influenzae, Caulobacter crescentus, or Bacillus subtilis. In some embodiments, the adenine deaminase is a naturally-occurring adenosine deaminase that includes one or more mutations corresponding to any of the mutations provided herein (e.g., mutations in ecTadA). The corresponding residue in any homologous protein can be identified by e.g., sequence alignment and determination of homologous residues. The mutations in any naturally-occurring adenosine deaminase (e.g., having homology to ecTadA) that correspond to any of the mutations described herein (e.g., any of the mutations identified in ecTadA) can be generated accordingly.

[0267] In some embodiments, the adenosine deaminase comprises an amino acid sequence that is at least 60%, at least 65%, at least 70%, at least 75%, at least 80%, at least 85%, at least 90%, at least 95%, at least 96%, at least 97%, at least 98%, at least 99%, or at least 99.5% identical to any one of the amino acid sequences set forth in any of the adenosine deaminases provided herein. It should be appreciated that adenosine deaminases provided herein may include one or more mutations (e.g., any of the mutations provided herein). The disclosure provides any deaminase domains with a certain percent identify plus any of the mutations or combinations thereof described herein. In some embodiments, the adenosine deaminase comprises an amino acid sequence that has 1, 2, 3, 4, 5, 6, 7, 8, 9, 10, 11, 12, 13, 14, 15, 16, 17, 18, 19, 20, 21, 22, 21, 24, 25, 26, 27, 28, 29, 30, 31, 32, 33, 34, 35, 36, 37, 38, 39, 40, 41, 42, 43, 44, 45, 46, 47, 48, 49, 50, or more mutations compared to a reference sequence, or any of the adenosine deaminases provided herein.

[0268] It should be appreciated that any of the mutations provided herein (e.g., based on a TadA reference sequence, such as TadA*7.10 (SEQ ID NO: 1)) can be introduced into other adenosine deaminases, such as E. coli TadA (ecTadA), S aureus TadA (saTadA), or other adenosine deaminases (e.g., bacterial adenosine deaminases). In some embodiments, the TadA reference sequence is TadA*7.10 (SEQ ID NO: 1). It would be apparent to the skilled artisan that additional deaminases may similarly be aligned to identify homologous amino acid residues that can be mutated as provided herein. Thus, any of the mutations identified in a TadA reference sequence can be made in other adenosine deaminases (e.g., ecTada) that have homologous amino acid residues. It should also be appreciated that any of the mutations provided herein can be made individually or in any combination in a TadA reference sequence or another adenosine deaminase.

[0269] In some embodiments, the adenosine deaminase comprises an alteration or set of alterations selected from those listed in Tables 5A-5E below:

TABLE 5A
Adenosine Deaminase Variants. Residue positions in the E. coli TadA variant (TadA*) are indicated.

| | 23 | 26 | 36 | 37 | 48 | 49 | 51 | 72 | 84 | 87 | 106 | 108 | 123 | 125 | 142 | 146 | 147 | 152 | 155 | 156 | 157 | 161 |
|---|---|---|---|---|---|---|---|---|---|---|---|---|---|---|---|---|---|---|---|---|---|---|
| TadA*0.1 | W | R | H | N | P | | R | N | L | S | A | D | H | G | A | S | D | R | E | I | K | K |
| TadA*0.2 | W | R | H | N | P | | R | N | L | S | A | D | H | G | A | S | D | R | E | I | K | K |
| TadA*1.1 | W | R | H | N | P | | R | N | L | S | A | N | H | G | A | S | D | R | E | I | K | K |
| TadA*1.2 | W | R | H | N | P | | R | N | L | S | V | N | H | G | A | S | D | R | E | I | K | K |
| TadA*2.1 | W | R | H | N | P | | R | N | L | S | V | N | H | G | A | S | Y | R | V | I | K | K |
| TadA*2.2 | W | R | H | N | P | | R | N | L | S | V | N | H | G | A | S | Y | R | V | I | K | K |
| TadA*2.3 | W | R | H | N | P | | R | N | L | S | V | N | H | G | A | S | Y | R | V | I | K | K |
| TadA*2.4 | W | R | H | N | P | | R | N | L | S | V | N | H | G | A | S | Y | R | V | I | K | K |
| TadA*2.5 | W | R | H | N | P | | R | N | L | S | V | N | H | G | A | S | Y | R | V | I | K | K |
| TadA*2.6 | W | R | H | N | P | | R | N | L | S | V | N | H | G | A | S | Y | R | V | I | K | K |
| TadA*2.7 | W | R | H | N | P | | R | N | L | S | V | N | H | G | A | S | Y | R | V | I | K | K |
| TadA*2.8 | W | R | H | N | P | | R | N | L | S | V | N | H | G | A | S | Y | R | V | I | K | K |
| TadA*2.9 | W | R | H | N | P | | R | N | L | S | V | N | H | G | A | S | Y | R | V | I | K | K |
| TadA*2.10 | W | R | H | N | P | | R | N | L | S | V | N | H | G | A | S | Y | R | V | I | K | K |
| TadA*2.11 | W | R | H | N | P | | R | N | L | S | V | N | H | G | A | S | Y | R | V | I | K | K |
| TadA*2.12 | W | R | H | N | P | | R | N | L | S | V | N | H | G | A | S | Y | R | V | I | K | K |
| TadA*3.1 | W | R | H | N | P | | R | N | F | S | V | N | Y | G | A | S | Y | R | V | F | K | K |
| TadA*3.2 | W | R | H | N | P | | R | N | F | S | V | N | Y | G | A | S | Y | R | V | F | K | K |
| TadA*3.3 | W | R | H | N | P | | R | N | F | S | V | N | Y | G | A | S | Y | R | V | F | K | K |
| TadA*3.4 | W | R | H | N | P | | R | N | F | S | V | N | Y | G | A | S | Y | R | V | F | K | K |
| TadA*3.5 | W | R | H | N | P | | R | N | F | S | V | N | Y | G | A | S | Y | R | V | F | K | K |
| TadA*3.6 | W | R | H | N | P | | R | N | F | S | V | N | Y | G | A | S | Y | R | V | F | K | K |
| TadA*3.7 | W | R | H | N | P | | R | N | F | S | V | N | Y | G | A | S | Y | R | V | F | K | K |
| TadA*3.8 | W | R | H | N | P | | R | N | F | S | V | N | Y | G | A | S | Y | R | V | F | K | K |
| TadA*4.1 | W | R | H | N | P | | R | N | L | S | V | N | H | G | N | S | Y | R | V | I | K | K |
| TadA*4.2 | W | G | H | N | P | | R | N | L | S | V | N | H | G | N | S | Y | R | V | I | K | K |
| TadA*4.3 | W | R | H | N | P | | R | N | F | S | V | N | Y | G | N | S | Y | R | V | F | K | K |
| TadA*5.1 | W | R | L | N | P | | L | N | F | S | V | N | Y | G | A | C | Y | R | V | F | N | K |
| TadA*5.2 | W | R | H | S | P | | R | N | F | S | V | N | Y | G | A | S | Y | R | V | F | K | T |
| TadA*5.3 | W | R | L | N | P | | L | N | I | S | V | N | Y | G | A | C | Y | R | V | F | N | K |
| TadA*5.4 | W | R | H | S | P | | R | N | F | S | V | N | Y | G | A | S | Y | R | V | F | K | T |
| TadA*5.5 | W | R | L | N | P | | L | N | F | S | V | N | Y | G | A | C | Y | R | V | F | N | K |
| TadA*5.6 | W | R | L | N | P | | L | N | F | S | V | N | Y | G | A | C | Y | R | V | F | N | K |
| TadA*5.7 | W | R | L | N | P | | L | N | F | S | V | N | Y | G | A | C | Y | R | V | F | N | K |
| TadA*5.8 | W | R | L | N | P | | L | N | F | S | V | N | Y | G | A | C | Y | R | V | F | N | K |
| TadA*5.9 | W | R | L | N | P | | L | N | F | S | V | N | Y | G | A | C | Y | R | V | F | N | K |
| TadA*5.10 | W | R | L | N | P | | L | N | F | S | V | N | Y | G | A | C | Y | R | V | F | N | K |
| TadA*5.11 | W | R | L | N | P | | L | N | F | S | V | N | Y | G | A | C | Y | R | V | F | N | K |
| TadA*5.12 | W | R | L | N | P | | L | N | F | S | V | N | Y | G | A | C | Y | R | V | F | N | K |
| TadA*5.13 | W | R | H | N | P | | L | D | F | S | V | N | Y | A | A | S | Y | R | V | F | K | K |
| TadA*5.14 | W | R | H | N | S | | L | N | F | C | V | N | Y | G | A | S | Y | R | V | F | K | K |
| TadA*6.1 | W | R | H | N | S | | L | N | F | S | V | N | Y | G | N | S | Y | R | V | F | K | K |
| TadA*6.2 | W | R | H | N | T | V | L | N | F | S | V | N | Y | G | N | S | Y | R | V | F | N | K |
| TadA*6.3 | W | R | L | N | S | | L | N | F | S | V | N | Y | G | A | C | Y | R | V | F | N | K |
| TadA*6.4 | W | R | L | N | S | | L | N | F | S | V | N | Y | G | N | C | Y | R | V | F | N | K |
| TadA*6.5 | W | R | L | N | T | V | L | N | F | S | V | N | Y | G | A | C | Y | R | V | F | N | K |
| TadA*6.6 | W | R | L | N | T | V | L | N | F | S | V | N | Y | G | N | C | Y | R | V | F | N | K |
| TadA*7.1 | W | R | L | N | A | | L | N | F | S | V | N | Y | G | A | C | Y | R | V | F | N | K |
| TadA*7.2 | W | R | L | N | A | | L | N | F | S | V | N | Y | G | N | C | Y | R | V | F | N | K |
| TadA*7.3 | L | R | L | N | A | | L | N | F | S | V | N | Y | G | A | C | Y | R | V | F | N | K |
| TadA*7.4 | R | R | L | N | A | | L | N | F | S | V | N | Y | G | A | C | Y | R | V | F | N | K |
| TadA*7.5 | W | R | L | N | A | | L | N | F | S | V | N | Y | G | A | C | Y | H | V | F | N | K |
| TadA*7.6 | W | R | L | N | A | | L | N | I | S | V | N | Y | G | A | C | Y | P | V | F | N | K |
| TadA*7.7 | L | R | L | N | A | | L | N | F | S | V | N | Y | G | A | C | Y | P | V | F | N | K |
| TadA*7.8 | L | R | L | N | A | | L | N | F | S | V | N | Y | G | N | C | Y | R | V | F | N | K |
| TadA*7.9 | L | R | L | N | A | | L | N | F | S | V | N | Y | G | N | C | Y | P | V | F | N | K |
| TadA*7.10 | R | R | L | N | A | | L | N | F | S | V | N | Y | G | A | C | Y | P | V | F | N | K |

TABLE 5B
Adenosine Deaminase Variants. Residue positions in the E. coli TadA variant
(TadA*) are indicated. Alterations are referenced to TadA*7.10 (first row).

| | 23 | 63 | 84 | 51 | 76 | 82 | 84 | 106 | 108 | 123 | 146 | 147 | 152 | 154 | 155 | 156 | 157 | 166 |
|---|---|---|---|---|---|---|---|---|---|---|---|---|---|---|---|---|---|---|
| TadA*7.10 | R | L | A | L | I | V | F | V | N | Y | C | Y | P | Q | V | F | N | T |
| TadA*8.1 | | | | | | | | | | | | T | | | | | | |
| TadA*8.2 | | | | | | | | | | | | R | | | | | | |
| TadA*8.3 | | | | | | | | | | | | | | S | | | | |
| TadA*8.4 | | | | | | | | | | H | | | | | | | | |
| TadA*8.5 | | | | | | S | | | | | | | | | | | | |
| TadA*8.6 | | | | | | | | | | | | | | | | | | R |
| TadA*8.7 | | | | | | | | | | | | | | R | | | | |
| TadA*8.8 | | | | | | | | | | H | | R | | R | | | | |
| TadA*8.9 | | | | | Y | | | | | | | R | | R | | | | |
| TadA*8.10 | | | | | | | | | | | | R | | R | | | | R |
| TadA*8.11 | | | | | | | | | | | | T | | R | | | | |
| TadA*8.12 | | | | | | | | | | | | T | | S | | | | |
| TadA*8.13 | | | | | Y | | | | | H | | R | | R | | | | |
| TadA*8.14 | | | | | Y | S | | | | | | | | | | | | |
| TadA*8.15 | | | | | | S | | | | | | R | | | | | | |
| TadA*8.16 | | | | | | S | | | | H | | R | | | | | | |
| TadA*8.17 | | | | | | S | | | | | | | | R | | | | |
| TadA*8.18 | | | | | | S | | | | H | | | | R | | | | |
| TadA*8.19 | | | | | | S | | | | H | | R | | R | | | | |
| TadA*8.20 | | | | | Y | S | | | | H | | R | | R | | | | |
| TadA*8.21 | | | | | | | | | | | | R | | S | | | | |
| TadA*8.22 | | | | | | S | | | | | | | | S | | | | |
| TadA*8.23 | | | | | | S | | | | H | | | | | | | | |
| TadA*8.24 | | | | | | S | | | | H | | T | | | | | | |

TABLE 5C
Adenosine Deaminase Variants. Alterations are referenced
to TadA*7.10. Additional details of TadA*9 adenosine
deaminases are described in International PCT Application
No. PCT/US2020/049975, which is incorporated herein
by reference in its entirety for all purposes.

| TadA*9 Description | Alterations |
|---|---|
| TadA*9.1 | E25F, V82S, Y123H, T133K, Y147R, Q154R |
| TadA*9.2 | E25F, V82S, Y123H, Y147R, Q154R |
| TadA*9.3 | V82S, Y123H, P124W, Y147R, Q154R |
| TadA*9.4 | L51W, V82S, Y123H, C146R, Y147R, Q154R |
| TadA*9.5 | P54C, V82S, Y123H, Y147R, Q154R |
| TadA*9.6 | Y73S, V82S, Y123H, Y147R, Q154R |
| TadA*9.7 | N38G, V82T, Y123H, Y147R, Q154R |
| TadA*9.8 | R23H, V82S, Y123H, Y147R, Q154R |
| TadA*9.9 | R21N, V82S, Y123H, Y147R, Q154R |
| TadA*9.10 | V82S, Y123H, Y147R, Q154R, A158K |
| TadA*9.11 | N72K, V82S, Y123H, D139L, Y147R, Q154R, |
| TadA*9.12 | E25F, V82S, Y123H, D139M, Y147R, Q154R |
| TadA*9.13 | M70V, V82S, M94V, Y123H, Y147R, Q154R |
| TadA*9.14 | Q71M, V82S, Y123H, Y147R, Q154R |
| TadA*9.15 | E25F, V82S, Y123H, T133K, Y147R, Q154R |
| TadA*9.16 | E25F, V82S, Y123H, Y147R, Q154R |
| TadA*9.17 | V82S, Y123H, P124W, Y147R, Q154R |
| TadA*9.18 | L51W, V82S, Y123H, C146R, Y147R, Q154R |
| TadA*9.19 | P54C, V82S, Y123H, Y147R, Q154R |
| TadA*9.2 | Y73S, V82S, Y123H, Y147R, Q154R |
| TadA*9.21 | N38G, V82T, Y123H, Y147R, Q154R |
| TadA*9.22 | R23H, V82S, Y123H, Y147R, Q154R |
| TadA*9.23 | R21N, V82S, Y123H, Y147R, Q154R |
| TadA*9.24 | V82S, Y123H, Y147R, Q154R, A158K |
| TadA*9.25 | N72K, V82S, Y123H, D139L, Y147R, Q154R, |
| TadA*9.26 | E25F, V82S, Y123H, D139M, Y147R, Q154R |
| TadA*9.27 | M70V, V82S, M94V, Y123H, Y147R, Q154R |
| TadA*9.28 | Q71M, V82S, Y123H, Y147R, Q154R |
| TadA*9.29 | E25F_I76Y_V82S_Y123H_Y147R_Q154R |
| TadA*9.30 | I76Y_V82T_Y123H_Y147R_Q154R |
| TadA*9.31 | N38G_I76Y_V82S_Y123H_Y147R_Q154R |
| TadA*9.32 | N38G_I76Y_V82T_Y123H_Y147R_Q154R |
| TadA*9.33 | R23H_I76Y_V82S_Y123H_Y147R_Q154R |
| TadA*9.34 | P54C_I76Y_V82S_Y123H_Y147R_Q154R |
| TadA*9.35 | R21N_I76Y_V82S_Y123H_Y147R_Q154R |
| TadA*9.36 | I76Y_V82S_Y123H_D138M_Y147R_Q154R |
| TadA*9.37 | Y72S_I76Y_V82S_Y123H_Y147R_Q154R |
| TadA*9.38 | E25F_I76Y_V82S_Y123H_Y147R_Q154R |
| TadA*9.39 | I76Y_V82T_Y123H_Y147R_Q154R |
| TadA*9.40 | N38G_I76Y_V82S_Y123H_Y147R_Q154R |
| TadA*9.41 | N38G_I76Y_V82T_Y123H_Y147R_Q154R |
| TadA*9.42 | R23H_I76Y_V82S_Y123H_Y147R_Q154R |
| TadA*9.43 | P54C_I76Y_V82S_Y123H_Y147R_Q154R |
| TadA*9.44 | R21N_I76Y_V82S_Y123H_Y147R_Q154R |
| TadA*9.45 | I76Y_V82S_Y123H_D138M_Y147R_Q154R |
| TadA*9.46 | Y72S_I76Y_V82S_Y123H_Y147R_Q154R |
| TadA*9.47 | N72K_V82S, Y123H, Y147R, Q154R |
| TadA*9.48 | Q71M_V82S, Y123H, Y147R, Q154R |
| TadA*9.49 | M70V, V82S, M94V, Y123H, Y147R, Q154R |
| TadA*9.50 | V82S, Y123H, T133K, Y147R, Q154R |
| TadA*9.51 | V82S, Y123H, T133K, Y147R, Q154R, A158K |
| TadA*9.52 | M70V, Q71M, N72K, V82S, Y123H, Y147R, |
| | Q154R |
| TadA*9.53 | N72K_V82S, Y123H, Y147R, Q154R |
| TadA*9.54 | Q71M_V82S, Y123H, Y147R, Q154R |
| TadA*9.55 | M70V, V82S, M94V, Y123H, Y147R, Q154R |
| TadA*9.56 | V82S, Y123H, T133K, Y147R, Q154R |
| TadA*9.57 | V82S, Y123H, T133K, Y147R, Q154R, A158K |
| TadA*9.58 | M70V, Q71M, N72K, V82S, Y123H, Y147R, |
| | Q154R |

[0270] In some embodiments, the adenosine deaminase comprises one or more of M1, S2A, S2E, W4D, W4E, V4M, F6S, H8E, H8Y, E9Y, M12S, R13H, R13I, R13Y, T17L, T17S, L18A, L18E, A19N, R21N, K20K, K20R, R21A, G22P, W23D, R23H, W23G, W23Q, W23L, W23R, D24E, D24G, E25F, E25M, E25D, E25A, E25G, E25R, E25V, E25S, E25Y, R26D, R26E, R26G, R26N, R26Q, R26C, R26L, R26K, R26W, E27V, E27D, P29V, V30G, L34S, L34V, L36H, H36L, H36N, N37N, N37T, N37S, N38G, N38R, W45A, W45L, W45N, N46N, R46W, R46F, R46Q, R46M, R47A, R47Q, R47F, R47K, R47P, R47W, R47M, P48T, P48L, P48A, P48I, P48S, I49G, I49H, I49V, I49F, I49H, G50L, R51H, R51L, R51N, L51W, R51Y, H52D, H52Y, D53P, P54C, P54T, A55H, T55A, A56E, A56S, E59A, E59G, E591, E59Q, E59W, M61A, M61I, M61L, M61V, L63S, L63V, Q65V, G66C, G67D, G67L, G67V, L68Q, M70H, M70Q, L84F, M70V, M70L, E70A, M70V, Q71M, Q71N, Q71L, Q71R, N72A, N72K, N72S, N72D, N72Y, Y73G, Y73I, Y73K, Y73R, Y73S, R74A, R74Q, R74G, R74K, R74L, R74N, I76D, I76F, I76I, I76N, I76T, I76Y, D77G, A78I, T79M, L80M, L80Y, V82A, V82S, V82G, V82T, L84E, L84F, L84Y, E85K, E85G, E85P, E85S, S87C, S87L, S87V, V88A, V88M, C90S, A91A, A91G, A91S, A91V, A91T, G92T, A93I, M94A, M94V, M94L, M94I, M94H, I95S, I95G, I95L, I95H, I95V, H96A, H96L, H96R, H96S, S97C, S97G, S97I, S97M, S97R, S97S, R98K, R98I, R98N, R98Q, G100R, G100V, R101V, R101R, V102A, V102F, V102I, V102V, D103A, F104G, D104N, F104V, F104I, F104L, A106T, V106Q, V106F, V106W, V106M, A106A, A106Q, A106F, A106G, A106W, A106M, A106V, A106R, R107C, R107G, R107P, R107K, R107A, R107N, R107W, R107H, R107S, D108N, D108F, D108G, D108V, D108A, D108Y, D108H, D108I, D108K, D108L, D108M, D108Q, N108Q, N108F, N108W, N108M, N108K, D108K, D108F, D108M, D108Q, D108R, D108W, D108S, A109H, A109K, A109R, A109S, A109T, A109V, K110G, K110H, K110I, K110R, K110T, T111A, T111G, T111H, T111R, G112A, A114G, A114H, A114V, G115S, L117M, L117N, L117V, M118D, M118G, M118K, M118N, M118V, D119L, D119N, D119S, D119V, V120H, V120L, H122H, H122N, H122P, H122R, H122S, H122Y, H123C, H123G, H123P, H123V, H123Y, Y123H, P124G, P124I, P124L, P124W, G125H, G125I, G125A, G125M, G125K, M126D, M126H, M126K, M126I, M126N, M1260, M126S, M126Y, N127H, N127S, N127D, N127K, N127R, H128R, R129H, R129Q, R129V, R129I, R129E, R129V, I132I, I132F, T133V, T133E, T133G, T133K, E134A, E134E, E134G, E134I, G135G, G135V, I136G, I136L, I136T, I137A, I137D, I137E, L137M, I137S, A138D, A138E, A138G, S138A, A138N, A138S, A138T, A138V, A138Y, D139E, D139I, D139C, D139L, D139M, E140A, E140C, E140L, E140R, A142N, A142D, A142G, A142A, A142L, A142S, A142T, A142N, A142S, A142V, A143D, A143E, A143G, A143D, A143G, A143E, A143L, A143W, A143M, A143S, A143Q, A143R, C146R, S146A, S146C, S146D, S146F, S146R, S146T, D147D, D147L, D147F, D147G, D147Y, Y147T, Y147R, Y147D, D147R, F148L, F148F, F148R, F148Y, F149C, F149M, F149R, F149Y, M151F, M151P, M151R, M151V, R152C, R152F, R152H, R152P, R152R, R153C, R153Q, R153R, R153V, Q154E, Q154H, Q154M, Q154R, Q154L, Q154S, Q154V, E155F, E155G, E155I, E155K, E155P, E155V, E155D, I156A, I156F, I156D, I156K, I156N, I156R, I156Y, E157A, E157F, E157I, E157P, E157T, E157V, N157K, K157N, K157R, A158Q, A158K, A158V, Q159F, Q159K, Q159L, Q159N, K160A, K160S, K160E, K160K, K160N, K161I, K161A, K161N, K161Q, K161S, K161T, A162D, A162Q, R162H, R162P, A162S, Q163G, Q163H, Q163N, Q163R, S164I, S164R, S164Y, S165A, S165D, S1651, S165T, S165Y, T166D, T166K, T166I, T166N, T166P, T166R, D167S and/or D167N mutation in a TadA reference sequence (e.g., TadA*7.10,ecTadA, or TadA8e), and any alternative mutation at the corresponding position, or any substitution from R26, W23, E27, H36, R47, P48, R51, H52, R74, I76, V82, V88, M94, 195, H96, A106, D108, A109, K110, T111, A114, D119, H122, H123, M126, N127, A142, S146, D147, F149, R152, Q154, E155, I156, E157, K161, T166, and/or D167, with respect to a TadA reference sequence, or a substitution of 2-50 amino acids in a TadA reference sequence, which may be selected from W23R, E27D, H36L, R47K, P48A, R51H, R51L, I76F, I76Y, V82S, A106V, D108G, A109S, K110R, T111H, A114V, D119N, H122R, H122N, H123Y, M126I, N127K, S146C, D147R, R152P, Q154R, E155V, I156F, K157N, K161N, T166I, and D167N, or one or more corresponding mutations in another adenosine deaminase. Additional mutations are described in U.S. Patent Application Publication No. 2022/0307003 A1 and International Patent Application Publications No. WO 2023/288304 A2 and WO 2023/034959 A2, the disclosures of which are incorporated herein by reference in their entirety for all purposes.

[0271] In embodiments, a variant of TadA*7.10 comprises one or more alterations selected from any of those alterations provided herein.

[0272] In particular embodiments, an adenosine deaminase heterodimer comprises a TadA*8 domain and an adenosine deaminase domain selected from Staphylococcus aureus (S. aureus) TadA, Bacillus subtilis (B. subtilis) TadA, Salmonella typhimurium (S. typhimurium) TadA, Shewanella putrefaciens (S. putrefaciens) TadA, Haemophilus influenzae F3031 (H. influenzae) TadA, Caulobacter crescentus (C. crescentus) TadA, Geobacter sulfurreducens (G. sulfurreducens) TadA, or TadA*7.10.

[0273] In some embodiments, the TadA*8 is a variant as shown in Table 5D. Table 5D shows certain amino acid position numbers in the TadA amino acid sequence and the amino acids present in those positions in the TadA-7.10 adenosine deaminase. Table 5D also shows amino acid changes in TadA variants relative to TadA-7.10 following phage-assisted non-continuous evolution (PANCE) and phage-assisted continuous evolution (PACE), as described in M. Richter et al., 2020, Nature Biotechnology, doi.org/10.1038/s41587-020-0453-z, the entire contents of which are incorporated by reference herein. In some embodiments, the TadA*8 is TadA*8a, TadA*8b, TadA*8c, TadA*8d, or TadA*8e. In some embodiments, the TadA*8 is TadA*8e. In one embodiment, an adenosine deaminase is a TadA*8 that comprises or consists essentially of SEQ ID NO: 316 or a fragment thereof having adenosine deaminase activity.

TABLE 5D
Select TadA*8 Variants

| | | TadA amino acid number | | | | | | | | | |
|---|---|---|---|---|---|---|---|---|---|---|---|
| | TadA | 26 | 88 | 109 | 111 | 119 | 122 | 147 | 149 | 166 | 167 |
| | TadA-7.10 | R | V | A | T | D | H | Y | F | T | D |
| PANCE 1 | | | | | R | | | | | | |
| PANCE 2 | | | | S/T | R | | | | | | |
| PACE | TadA-8a | C | | S | R | N | N | D | Y | I | N |
| | TadA-8b | | A | S | R | N | N | | Y | I | N |
| | TadA-8c | C | | S | R | N | N | | Y | I | N |
| | TadA-8d | | A | | R | N | | | Y | | |
| | TadA-8e | | | S | R | N | N | D | Y | I | N |

[0274] In some embodiments, the TadA variant is a variant as shown in Table 5E. Table 5E shows certain amino acid position numbers in the TadA amino acid sequence and the amino acids present in those positions in the TadA*7.10 adenosine deaminase. In some embodiments, the TadA variant is MSP605, MSP680, MSP823, MSP824, MSP825, MSP827, MSP828, or MSP829. In some embodiments, the TadA variant is MSP828. In some embodiments, the TadA variant is MSP829.

TABLE 5E
TadA Variants

| | TadA Amino Acid Number | | | | | | | |
|---|---|---|---|---|---|---|---|---|
| Variant | 36 | 76 | 82 | 147 | 149 | 154 | 157 | 167 |
| TadA-7.10 | L | I | V | Y | F | Q | N | D |
| MSP605 | | | G | T | | S | | |
| MSP680 | | Y | G | T | | S | | |
| MSP823 | H | | G | T | | S | K | |
| MSP824 | | | G | D | Y | S | | N |
| MSP825 | H | | G | D | Y | S | K | N |
| MSP827 | H | Y | G | T | | S | K | |
| MSP828 | | Y | G | D | Y | S | | N |
| MSP829 | H | Y | G | D | Y | S | K | N |

[0275] In particular embodiments, the fusion proteins or complexes comprise a single (e.g., provided as a monomer) TadA* (e.g., TadA*8 or TadA*9). Throughout the present disclosure, an adenosine deaminase base editor that comprises a single TadA* domain is indicates using the terminology ABEm or ABE #m, where “#” is an identifying number (e.g., ABE8.20m), where “m” indicates “monomer.” In some embodiments, the TadA* is linked to a Cas9 nickase. In some embodiments, the fusion proteins or complexes of the disclosure comprise as a heterodimer of a wild-type TadA (TadA(wt)) linked to a TadA*. Throughout the present disclosure, an adenosine deaminase base editor that comprises a single TadA* domain and a TadA(wt) domain is indicates using the terminology ABEd or ABE #d, where “#” is an identifying number (e.g., ABE8.20d), where “d” indicates “dimer.” In other embodiments, the fusion proteins or complexes of the disclosure comprise as a heterodimer of a TadA*7.10 linked to a TadA*. In some embodiments, the base editor is ABE8 comprising a TadA* variant monomer. In some embodiments, the base editor is ABE comprising a heterodimer of a TadA* and a TadA(wt). In some embodiments, the base editor is ABE comprising a heterodimer of a TadA* and TadA*7.10. In some embodiments, the base editor is ABE comprising a heterodimer of a TadA*. In some embodiments, the TadA* is selected from Tables 5A-5E.

[0276] In some embodiments, the adenosine deaminase is expressed as a monomer. In other embodiments, the adenosine deaminase is expressed as a heterodimer. In some embodiments, the deaminase or other polypeptide sequence lacks a methionine, for example when included as a component of a fusion protein. This can alter the numbering of positions. However, the skilled person will understand that such corresponding mutations refer to the same mutation.

[0277] Any of the mutations provided herein and any additional mutations (e.g., based on the ecTadA amino acid sequence) can be introduced into any other adenosine deaminases. Any of the mutations provided herein can be made individually or in any combination in a TadA reference sequence or another adenosine deaminase (e.g., ecTadA).

[0278] Details of A to G nucleobase editing proteins are described in International PCT Application No. PCT/US2017/045381 (WO2018/027078) and Gaudelli, N. M., et al., “Programmable base editing of A·T to G·C in genomic DNA without DNA cleavage” Nature, 551, 464-471 (2017), the entire contents of which are hereby incorporated by reference.

### C to T Editing

[0279] In some embodiments, a base editor disclosed herein comprises a fusion protein or complex comprising cytidine deaminase capable of deaminating a target cytidine (C) base of a polynucleotide to produce uridine (U), which has the base pairing properties of thymine. In some embodiments, for example where the polynucleotide is double-stranded (e.g., DNA), the uridine base can then be substituted with a thymidine base (e.g., by cellular repair machinery) to give rise to a C:G to a T:A transition. In other embodiments, deamination of a C to U in a nucleic acid by a base editor cannot be accompanied by substitution of the U to a T.

[0280] The deamination of a target C in a polynucleotide to give rise to a U is a non-limiting example of a type of base editing that can be executed by a base editor described herein. In another example, a base editor comprising a cytidine deaminase domain can mediate conversion of a cytosine (C) base to a guanine (G) base. For example, a U of a polynucleotide produced by deamination of a cytidine by a cytidine deaminase domain of a base editor can be excised from the polynucleotide by a base excision repair mechanism (e.g., by a uracil DNA glycosylase (UDG) domain), producing an abasic site. The nucleobase opposite the abasic site can then be substituted (e.g., by base repair machinery) with another base, such as a C, by for example a translesion polymerase. Although it is typical for a nucleobase opposite an abasic site to be replaced with a C, other substitutions (e.g., A, G or T) can also occur.

[0281] Accordingly, in some embodiments a base editor described herein comprises a deamination domain (e.g., cytidine deaminase domain) capable of deaminating a target C to a U in a polynucleotide. Further, as described below, the base editor can comprise additional domains which facilitate conversion of the U resulting from deamination to, in some embodiments, a T or a G. For example, a base editor comprising a cytidine deaminase domain can further comprise a uracil glycosylase inhibitor (UGI) domain to mediate substitution of a U by a T, completing a C-to-T base editing event. In another example, the base editor can comprise a uracil stabilizing protein as described herein. In another example, a base editor can incorporate a translesion polymerase to improve the efficiency of C-to-G base editing, since a translesion polymerase can facilitate incorporation of a C opposite an abasic site (i.e., resulting in incorporation of a G at the abasic site, completing the C-to-G base editing event).

[0282] A base editor comprising a cytidine deaminase as a domain can deaminate a target C in any polynucleotide, including DNA, RNA and DNA-RNA hybrids.

[0283] In some embodiments, a cytidine deaminase of a base editor comprises all or a portion (e.g., a functional portion) of an apolipoprotein B mRNA editing complex (APOBEC) family deaminase. APOBEC is a family of evolutionarily conserved cytidine deaminases. Members of this family are C-to-U editing enzymes. The N-terminal domain of APOBEC like proteins is the catalytic domain, while the C-terminal domain is a pseudocatalytic domain. More specifically, the catalytic domain is a zinc dependent cytidine deaminase domain and is important for cytidine deamination. APOBEC family members include APOBEC1, APOBEC2, APOBEC3A, APOBEC3B, APOBEC3C, APOBEC3D (“APOBEC3E” now refers to this), APOBEC3F, APOBEC3G, APOBEC3H, APOBEC4, and Activation-induced (cytidine) deaminase.

[0284] Other exemplary deaminases that can be fused to Cas9 according to aspects of this disclosure are provided below. In embodiments, the deaminases are activation-induced deaminases (AID). It should be understood that, in some embodiments, the active domain of the respective sequence can be used, e.g., the domain without a localizing signal (nuclear localization sequence, without nuclear export signal, cytoplasmic localizing signal).

[0285] Some aspects of the present disclosure are based on the recognition that modulating the deaminase domain catalytic activity of any of the fusion proteins or complexes described herein, for example by making point mutations in the deaminase domain, affect the processivity of the fusion proteins (e.g., base editors) or complexes. For example, mutations that reduce, but do not eliminate, the catalytic activity of a deaminase domain within a base editing fusion protein or complexes can make it less likely that the deaminase domain will catalyze the deamination of a residue adjacent to a target residue, thereby narrowing the deamination window. The ability to narrow the deamination window can prevent unwanted deamination of residues adjacent to specific target residues, which can decrease or prevent off-target effects.

[0286] In some embodiments, an APOBEC deaminase incorporated into a base editor can comprise one or more mutations selected from the group consisting of H121R, H122R, R126A, R126E, R118A, W90A, W90Y, and R132E of rAPOBEC1; D316R, D317R, R320A, R320E, R313A, W285A, W285Y, and R326E of hAPOBEC3G; and any alternative mutation at the corresponding position, or one or more corresponding mutations in another APOBEC deaminase.

[0287] A number of modified cytidine deaminases are commercially available, including, but not limited to, SaBE3, SaKKH-BE3, VQR-BE3, EQR-BE3, VRER-BE3, YE1-BE3, EE-BE3, YE2-BE3, and YEE-BE3, which are available from Addgene (plasmids 85169, 85170, 85171, 85172, 85173, 85174, 85175, 85176, 85177). In some embodiments, a deaminase incorporated into a base editor comprises all or a portion (e.g., a functional portion) of an APOBEC1 deaminase.

[0288] In some embodiments, the fusion proteins or complexes of the disclosure comprise one or more cytidine deaminase domains. In some embodiments, the cytidine deaminases provided herein are capable of deaminating cytosine or 5-methylcytosine to uracil or thymine. In some embodiments, the cytidine deaminases provided herein are capable of deaminating cytosine in DNA. The cytidine deaminase may be derived from any suitable organism. In some embodiments, the cytidine deaminase is a naturally-occurring cytidine deaminase that includes one or more mutations corresponding to any of the mutations provided herein. One of skill in the art will be able to identify the corresponding residue in any homologous protein, e.g., by sequence alignment and determination of homologous residues. Accordingly, one of skill in the art would be able to generate mutations in any naturally-occurring cytidine deaminase that corresponds to any of the mutations described herein. In some embodiments, the cytidine deaminase is from a prokaryote. In some embodiments, the cytidine deaminase is from a bacterium. In some embodiments, the cytidine deaminase is from a mammal (e.g., human).

[0289] In some embodiments, the cytidine deaminase comprises an amino acid sequence that is at least 60%, at least 65%, at least 70%, at least 75%, at least 80%, at least 85%, at least 90%, at least 95%, at least 96%, at least 97%, at least 98%, at least 99%, or at least 99.5% identical to any one of the cytidine deaminase amino acid sequences set forth herein. It should be appreciated that cytidine deaminases provided herein may include one or more mutations (e.g., any of the mutations provided herein). Some embodiments provide a polynucleotide molecule encoding the cytidine deaminase nucleobase editor polypeptide of any previous aspect or as delineated herein. In some embodiments, the polynucleotide is codon optimized.

[0290] In embodiments, a fusion protein of the disclosure comprises two or more nucleic acid editing domains.

[0291] Details of C to T nucleobase editing proteins are described in International PCT Application No. PCT/US2016/058344 (WO2017/070632) and Komor, A. C., et al., “Programmable editing of a target base in genomic DNA without double-stranded DNA cleavage” Nature 533, 420-424 (2016), the entire contents of which are hereby incorporated by reference.

### Cytidine Adenosine Base Editors (CABEs)

[0292] In some embodiments, a base editor described herein comprises an adenosine deaminase variant that has increased cytidine deaminase activity. Such base editors may be referred to as “cytidine adenosine base editors (CABEs)” or “cytosine base editors derived from TadA* (CBE-Ts),” and their corresponding deaminase domains may be referred to as “TadA* acting on DNA cytosine (T_{AD}C)” domains. In some instances, an adenosine deaminase variant has both adenine and cytosine deaminase activity (i.e., is a dual deaminase). In some embodiments, the adenosine deaminase variants deaminate adenine and cytosine in DNA. In some embodiments, the adenosine deaminase variants deaminate adenine and cytosine in single-stranded DNA. In some embodiments, the adenosine deaminase variants deaminate adenine and cytosine in RNA. In some embodiments, the adenosine deaminase variant predominantly deaminates cytosine in DNA and/or RNA (e.g., greater than 30%, 40%, 50%, 60%, 70%, 80%, 90%, 95%, or 99% of all deaminations catalyzed by the adenosine deaminase variant, or the number of cytosine deaminations catalyzed by the variant is about or at least about 2-fold, 3-fold, 4-fold, 5-fold, 6-fold, 7-fold, 8-fold, 9-fold, 10-fold, 25-fold, 50-fold, 75-fold, 100-fold, 500-fold, or 1,000-fold greater than the number adenine deaminations catalyzed by the variant). In some embodiments, the adenosine deaminase variant has approximately equal cytosine and adenosine deaminase activity (e.g., the two activities are within about 10% or 20% of each other). In some embodiments, the adenosine deaminase variant has predominantly cytosine deaminase activity, and little, if any, adenosine deaminase activity. In some embodiments, the adenosine deaminase variant has cytosine deaminase activity, and no significant or no detectable adenosine deaminase activity. In some embodiments, the target polynucleotide is present in a cell in vitro or in vivo. In some embodiments, the cell is a bacteria, yeast, fungi, insect, plant, or mammalian cell.

[0293] In some embodiments, the CABE comprises a bacterial TadA deaminase variant (e.g., ecTadA). In some embodiments, the CABE comprises a truncated TadA deaminase variant. In some embodiments, the CABE comprises a fragment of a TadA deaminase variant. In some embodiments, the CABE comprises a TadA*8.20 variant.

[0294] In some embodiments, an adenosine deaminase variant of the disclosure is a TadA adenosine deaminase comprising one or more alterations that increase cytosine deaminase activity (e.g., at least about 10-fold, 20-fold, 30-fold, 40-fold, 50-fold, 60-fold, 70-fold or more increase) while maintaining adenosine deaminase activity (e.g., at least about 30%, 40%, 50% or more of the activity of a reference adenosine deaminase (e.g., TadA*8.20 or TadA*8.19)). In some instances, the adenosine deaminase variant comprises one or more alterations that increase cytosine deaminase activity (e.g., at least about 10-fold, 20-fold, 30-fold, 40-fold, 50-fold, 60-fold, 70-fold or more increase) relative to the activity of a reference adenosine deaminase and comprise undetectable adenosine deaminase activity or adenosine deaminase activity that is less than 30%, 20%, 10%, or 5% of that of a reference adenosine deaminase. In some embodiments, the reference adenosine deaminase is TadA*8.20 or TadA*8.19.

[0295] In some embodiments, the adenosine deaminase variant is an adenosine deaminase comprising two or more alterations at an amino acid position selected from the group consisting of 2, 4, 6, 8, 13, 17, 23, 27, 29, 30, 47, 48, 49, 67, 76, 77, 82, 84, 96, 100, 107, 112, 114, 115, 118, 119, 122, 127, 142, 143, 147, 149, 158, 159, 162 165, 166, and 167, of an amino acid sequence having at least about 70%, 75%, 80%, 85%, 90%, 95%, 98%, 99% or greater identity to SEQ ID NO: 1, or a corresponding alteration in another deaminase. I

[0296] In some embodiments, the adenosine deaminase variant is an adenosine deaminase comprising one or more alterations selected from the group consisting of S2H, V4K, V4S, V4T, V4Y, F6G, F6H, F6Y, H8Q, R13G, T17A, T17W, R23Q, E27C, E27G, E27H, E27K, E27Q, E27S, E27G, P29A, P29G, P29K, V30F, V30I, R47G, R47S, A48G, I49K, I49M, I49N, I49Q, I49T, G67W, I76H, I76R, I76W, Y76H, Y76R, Y76W, F84A, F84M, H96N, G100A, G100K, T111H, G112H, A114C, G115M, M118L, H122G, H122R, H122T, N127I, N127K, N127P, A142E, R147H, A158V, Q159S, A162C, A162N, A162Q, and S165P of an amino acid sequence having at least about 70%, 75%, 80%, 85%, 90%, 95%, 98%, 99% or greater identity to SEQ ID NO: 1, or a corresponding alteration in another deaminase.

[0297] In some embodiments, the adenosine deaminase variant is an adenosine deaminase comprising an amino acid alteration or combination of amino acid alterations selected from those listed in any of Tables 6A-6F.

[0298] The residue identity of exemplary adenosine deaminase variants that are capable of deaminating adenine and/or cytidine in a target polynucleotide (e.g., DNA) is provided in Tables 6A-6F below. Further examples of adenosine deaminase variants include the following variants of 1.17 (see Table 6A): 1.17+E27H; 1.17+E27K; 1.17+E27S; 1.17+E27S+I49K; 1.17+E27G; 1.17+I49N; 1.17+E27G+I49N; and 1.17+E27Q. In some embodiments, any of the amino acid alterations provided herein are substituted with a conservative amino acid. Additional mutations known in the art can be further added to any of the adenosine deaminase variants provided herein.

[0299] In some embodiments, the base editor systems comprising a CABE provided herein have at least about a 30%, 40%, 50%, 60%, 70% or more C to T editing activity in a target polynucleotide (e.g., DNA). In some embodiments, a base editor system comprising a CABE as provided herein has an increased C to T base editing activity (e.g., increased at least about 30-fold, 40-fold, 50-fold, 60-fold, 70-fold or more) relative to a reference base editor system comprising a reference adenosine deaminase (e.g., TadA*8.20 or TadA*8.19).

TABLE 6A
Adenosine Deaminase Variants. Mutations are indicated with reference to TadA*8.20.
“S” indicates “Surface,” and “NAS” indicates “Near Active Site.”

| | location in structure | | | | | | | | | | |
|---|---|---|---|---|---|---|---|---|---|---|---|
| | N/A | S h1 | S h1 | Sh 1 | NAS | NAS | NAS | NAS | | S | |
| | Amino Acid No. (*START Met is AA#1) | | | | | | | | | | |
| | 2 | 8 | 13 | 17 | 27 | 47 | 48 | 49 | 67 | 76 | 77 |
| TadA*8.20 | S | H | R | T | E | R | A | I | G | Y | D |
| TadA*8.19 | | | | | | | | | | I | |
| 1.1 | | | | | H | | | | | I | |
| 1.2 | | | | | H | | | K | | I | |
| 1.3 | | | | | S | | | K | | I | |
| 1.4 | | | | | S | | | K | | I | |
| 1.5 | | | | | K | | | | | | |
| 1.6 | | | | | K | | | | | | |
| 1.7 | | | | | H | | | | | I | |
| 1.8 | | | | | S | | | K | W | | |
| 1.9 | | | | | | | | T | W | | |
| 1.10 | | | | | C | | | | | I | |
| 1.11 | | | G | | Q | | | | | | |
| 1.12 | | | | A | H | | | M | | I | |
| 1.13 | | | | | | | | Q | | I | |
| 1.14 | H | | | | | | | K | | I | |
| 1.15 | | | | | | S | | | | | |
| 1.16 | | Q | | | | | | Q | | I | |
| 1.17 | | | | A | | | G | | | | |
| 1.18 | | | | | G | | | | | | |
| 1.19 | | | | | G | | | N | | | |
| 1.20 | | | | | G | | | | | | G |

Adenosine Deaminase Variants. Mutations are indicated with
reference to TadA*8.20. “I” indicates “Internal,” “S” indicates
“Surface,” and “NAS” indicates “Near Active Site.”

| | location in structure | | | | | | | | | | | |
|---|---|---|---|---|---|---|---|---|---|---|---|---|
| | I | NAS | | NAS | S | | S | S | S | | S | |
| | Amino Acid No. (*START Met is AA#1) | | | | | | | | | | | |
| | 82 | 84 | 96 | 107 | 112 | 115 | 118 | 119 | 127 | 142 | 162 | 165 |
| TadA*8.20 | S | F | H | R | G | G | M | D | N | A | A | S |
| TadA*8.19 | | | | | | | | | | | | |
| 1.1 | | M | | | | | | | | | | |
| 1.2 | | | | | | | | | | | | |
| 1.3 | | | | | | | | | | | | |
| 1.4 | | | | | | | | | | | N | |
| 1.5 | | | | | | | | | | | | |
| 1.6 | | | | | | | | N | | | | |
| 1.7 | | | | | | | | | | | | |
| 1.8 | | | | | | | | | | | | |
| 1.9 | | | N | | | | | | | | | |
| 1.10 | | | | | | | | N | | | | |
| 1.11 | | | | | | | | | K | | | |
| 1.12 | | | | | | | L | | | | | |
| 1.13 | | | | | | M | | | | | | |
| 1.14 | | | | | H | | | | | | | |
| 1.15 | | | | C | | | | | | | | |
| 1.16 | | | | | | | | | | | | |
| 1.17 | T | | | | | | | | | E | | |
| 1.18 | | | | | | | | | | | | |
| 1.19 | | | | | | | | | | | | |
| 1.20 | | | | | | | | | | | | P |

TABLE 6B
Adenosine deaminase variants. Mutations are
indicated with reference to TadA*8.20.

| | Position No. | | | | | | | | | |
|---|---|---|---|---|---|---|---|---|---|---|
| | 27 | 29 | 30 | 49 | 82 | 84 | 107 | 112 | 115 | 142 |
| | TadA*8.20 | | | | | | | | | |
| | E | P | V | I | S | F | R | G | G | A |
| | Alterations Evaluated | | | | | | | | | |
| | G/S/H | G/A/K | I/L/F | K | T | L/A | C | H | M | E |
| S1.1 | S | | | K | T | | | | | |
| S1.2 | S | | | K | T | | C | | | |
| S1.3 | S | | | K | T | | | H | | |
| S1.4 | S | | | K | T | | | | M | |
| S1.5 | S | | | K | T | | | | | E |
| S1.6 | S | | | K | T | | C | H | | |
| S1.7 | S | | | K | T | | C | | M | |
| S1.8 | S | | | K | T | | C | | | E |
| S1.9 | S | | | K | T | | | H | | E |
| S1.10 | S | | | K | T | | | | M | E |
| S1.11 | S | | | K | T | | C | H | M | E |
| S1.12 | S | | I | K | T | | | | | |
| S1.13 | S | | I | K | T | | C | | | |
| S1.14 | S | | I | K | T | | | H | | |
| S1.15 | S | | I | K | T | | | | M | |
| S1.16 | S | | I | K | T | | | | | E |
| S1.17 | S | | I | K | T | | C | H | | |
| S1.18 | S | | I | K | T | | C | | M | |
| S1.19 | S | | I | K | T | | C | | | E |
| S1.20 | S | | I | K | T | | | H | | E |
| S1.21 | S | | I | K | T | | | | M | E |
| S1.22 | S | | I | K | T | | C | H | M | E |
| S1.23 | S | | L | K | T | | | | | |
| S1.24 | S | | L | K | T | | C | | | |
| S1.25 | S | | L | K | T | | | H | | |
| S1.26 | S | | L | K | T | | | | M | |
| S1.27 | S | | L | K | T | | | | | E |
| S1.28 | S | | L | K | T | | C | H | | |
| S1.29 | S | | L | K | T | | C | | M | |
| S1.30 | S | | L | K | T | | C | | | E |
| S1.31 | S | | L | K | T | | | H | | E |
| S1.32 | S | | L | K | T | | | | M | E |
| S1.33 | S | | L | K | T | | C | H | M | E |
| S1.34 | S | | F | K | T | A | | | | |
| S1.35 | S | | F | K | T | A | C | | | |
| S1.36 | S | | F | K | T | A | | H | | |
| S1.37 | S | | F | K | T | A | | | M | |
| S1.38 | S | | F | K | T | A | | | | E |
| S1.39 | S | | F | K | T | A | C | H | | |
| S1.40 | S | | F | K | T | A | C | | M | |
| S1.41 | S | | F | K | T | A | C | | | E |
| S1.42 | S | | F | K | T | A | | H | | E |
| S1.43 | S | | F | K | T | A | | | M | E |
| S1.44 | S | | F | K | T | A | C | H | M | E |
| S1.45 | S | | | K | T | L | | | | |
| S1.46 | S | | | K | T | L | C | | | |
| S1.47 | S | | | K | T | L | | H | | |
| S1.48 | S | | | K | T | L | | | M | |
| S1.49 | S | | | K | T | L | | | | E |
| S1.50 | S | | | K | T | L | C | H | | |
| S1.51 | S | | | K | T | L | C | | M | |
| S1.52 | S | | | K | T | L | C | | | E |
| S1.53 | S | | | K | T | L | | H | | E |
| S1.54 | S | | | K | T | L | | | M | E |
| S1.55 | S | | | K | T | L | C | H | M | E |
| S1.56 | S | | I | K | T | L | | | | |
| S1.57 | S | | I | K | T | | C | | | |
| S1.58 | S | | I | K | T | L | | H | | |
| S1.59 | S | | I | K | T | L | | | M | |
| S1.60 | S | | I | K | T | L | | | | E |
| S1.61 | S | | I | K | T | L | C | H | | |
| S1.62 | S | | I | K | T | L | C | | M | |
| S1.63 | S | | I | K | T | L | C | | | E |
| S1.64 | S | | I | K | T | L | | H | | E |
| S1.65 | S | | I | K | T | L | | | M | E |
| S1.66 | S | | I | K | T | L | C | H | M | E |
| S1.67 | S | G | | K | T | | | | | |
| S1.68 | S | G | | K | T | | C | | | |
| S1.69 | S | G | | K | T | | | H | | |
| S1.70 | S | G | | K | T | | | | M | |
| S1.71 | S | G | | K | T | | | | | E |
| S1.72 | S | G | | K | T | | C | H | | |
| S1.73 | S | G | | K | T | | C | | M | |
| S1.74 | S | G | | K | T | | C | | | E |
| S1.75 | S | G | | K | T | | | H | | E |
| S1.76 | S | G | | K | T | | | | M | E |
| S1.77 | S | G | | K | T | | C | H | M | E |
| S1.78 | | G | | K | T | | | | | |
| S1.79 | | G | | K | T | | C | | | |
| S1.80 | | G | | K | T | | | H | | |
| S1.81 | | G | | K | T | | | | M | |
| S1.82 | | G | | K | T | | | | | E |
| S1.83 | | G | | K | T | | C | H | | |
| S1.84 | | G | | K | T | | C | | M | |
| S1.85 | | G | | K | T | | C | | | E |
| S1.86 | | G | | K | T | | | H | | E |
| S1.87 | | G | | K | T | | | | M | E |
| S1.88 | | G | | K | T | | C | H | M | E |
| S1.89 | | K | | K | T | | | | | |
| S1.90 | | K | | K | T | | C | | | |
| S1.91 | | K | | K | T | | | H | | |
| S1.92 | | K | | K | T | | | | M | |
| S1.93 | | K | | K | T | | | | | E |
| S1.94 | | K | | K | T | | C | H | | |
| S1.95 | | K | | K | T | | C | | M | |
| S1.96 | | K | | K | T | | C | | | E |
| S1.97 | | K | | K | T | | | H | | E |
| S1.98 | | K | | K | T | | | | M | E |
| S1.99 | | K | | K | T | | C | H | M | E |
| S1.100 | | K | I | K | T | | | | | |
| S1.101 | | K | I | K | T | | C | | | |
| S1.102 | | K | I | K | T | | | H | | |
| S1.103 | | K | I | K | T | | | | M | |
| S1.104 | | K | I | K | T | | | | | E |
| S1.105 | | K | I | K | T | | C | H | | |
| S1.106 | | K | I | K | T | | C | | M | |
| S1.107 | | K | I | K | T | | C | | | E |
| S1.108 | | K | I | K | T | | | H | | E |
| S1.109 | | K | I | K | T | | | | M | E |
| S1.110 | | K | I | K | T | | C | H | M | E |
| S1.111 | | K | | K | T | L | | | | |
| S1.112 | | K | | K | T | L | C | | | |
| S1.113 | | K | | K | T | L | | H | | |
| S1.114 | | K | | K | T | L | | | M | |
| S1.115 | | K | | K | T | L | | | | E |
| S1.116 | | K | | K | T | L | C | H | | |
| S1.117 | | K | | K | T | L | C | | M | |
| S1.118 | | K | | K | T | L | C | | | E |
| S1.119 | | K | | K | T | L | | H | | E |
| S1.120 | | K | | K | T | L | | | M | E |
| S1.121 | | K | | K | T | L | C | H | M | E |
| S1.122 | | K | I | K | T | L | | | | |
| S1.123 | | K | I | K | T | L | C | | | |
| S1.124 | | K | I | K | T | L | | H | | |
| S1.125 | | K | I | K | T | L | | | M | |
| S1.126 | | K | I | K | T | L | | | | E |
| S1.127 | | K | I | K | T | L | C | H | | |
| S1.128 | | K | I | K | T | L | C | | M | |
| S1.129 | | K | I | K | T | L | C | | | E |
| S1.130 | | K | I | K | T | L | | H | | E |
| S1.131 | | K | I | K | T | L | | | M | E |
| S1.132 | | K | | K | T | L | C | H | M | E |
| S1.133 | G | | | K | T | | | | | |
| S1.134 | G | | | K | T | | C | | | |
| S1.135 | G | | | K | T | | | H | | |
| S1.136 | G | | | K | T | | | | M | |
| S1.137 | G | | | K | T | | | | | E |
| S1.138 | G | | | K | T | | C | H | | |
| S1.139 | G | | | K | T | | C | | M | |
| S1.140 | G | | | K | T | | C | | | E |
| S1.141 | G | | | K | T | | | H | | E |
| S1.142 | G | | | K | T | | | | M | E |
| S1.143 | G | | | K | T | | C | H | M | E |
| S1.144 | H | | | K | T | | | | | |
| S1.145 | H | | | K | T | | C | | | |
| S1.146 | H | | | K | T | | | H | | |
| S1.147 | H | | | K | T | | | | M | |
| S1.148 | H | | | K | T | | | | | E |
| S1.149 | H | | | K | T | | C | H | | |
| S1.150 | H | | | K | T | | C | | M | |
| S1.151 | H | | | K | T | | C | | | E |
| S1.152 | H | | | K | T | | | H | | E |
| S1.153 | H | | | K | T | | | | M | E |
| S1.154 | H | | | K | T | | C | H | M | E |
| S1.155 | S | | | | T | | | | | |
| S1.156 | S | | | | T | | C | | | |
| S1.157 | S | | | | T | | | H | | |
| S1.158 | S | | | | T | | | | M | |
| S1.159 | S | | | | T | | | | | E |
| S1.160 | S | | | | T | | C | H | | |
| S1.161 | S | | | | T | | C | | M | |
| S1.162 | S | | | | T | | C | | | E |
| S1.163 | S | | | | T | | | H | | E |
| S1.164 | S | | | | T | | | | M | E |
| S1.165 | S | | | | T | | C | H | M | E |
| S1.166 | | A | | | T | | | | | |
| S1.167 | | A | | | T | | C | | | |
| S1.168 | | A | | | T | | | H | | |
| S1.169 | | A | | | T | | | | M | |
| S1.170 | | A | | | T | | | | | E |
| S1.171 | | A | | | T | | C | H | | |
| S1.172 | | A | | | T | | C | | M | |
| S1.173 | | A | | | T | | C | | | E |
| S1.174 | | A | | | T | | | H | | E |
| S1.175 | | A | | | T | | | | M | E |
| S1.176 | | A | | | T | | C | H | M | E |
| S1.177 | S | | I | | T | | | | | |
| S1.178 | S | | I | | T | | C | | | |
| S1.179 | S | | I | | T | | | H | | |
| S1.180 | S | | I | | T | | | | M | |
| S1.181 | S | | I | | T | | | | | E |
| S1.182 | S | | I | | T | | C | H | | |
| S1.183 | S | | I | | T | | C | | M | |
| S1.184 | S | | I | | T | | C | | | E |
| S1.185 | S | | I | | T | | | H | | E |
| S1.186 | S | | I | | T | | | | M | E |
| S1.187 | S | | I | | T | | C | H | M | E |
| S1.188 | | A | I | | T | L | | | | |
| S1.189 | | A | I | | T | L | C | | | |
| S1.190 | | A | I | | T | L | | H | | |
| S1.191 | | A | I | | T | L | | | M | |
| S1.192 | | A | I | | T | L | | | | E |
| S1.193 | | A | I | | T | L | C | H | | |
| S1.194 | | A | I | | T | L | C | | M | |
| S1.195 | | A | I | | T | L | C | | | E |
| S1.196 | | A | I | | T | L | | H | | E |
| S1.197 | | A | I | | T | L | | | M | E |
| S1.198 | | A | I | | T | L | C | H | M | E |
| S1.199 | S | A | L | K | T | L | C | H | M | E |

TABLE 6C
Adenosine deaminase variants. Mutations are indicated
with reference to variant 1.2 (Table 6A).

| | | Residue identity (START Met is amino acid #1) | | | | | | | | |
|---|---|---|---|---|---|---|---|---|---|---|
| | Variant Name | | | | | | | | | |
| | Alternative Variant | | | | | | | | | |
| | Names | 4 | 6 | 17 | 23 | 76 | 77 | 100 | 111 | 114 |
| | Reference | | | | | | | | | |
| | 1.2 (see Table 6A) | V | F | T | R | I | D | G | T | A |
| TadAC2.1 | pDKL-135; 2.1 | K | | | | | | | | |
| TadAC2.2 | pDKL-136; 2.2 | K | | | | | G | | | |
| TadAC2.3 | pDKL-137; 2.3 | | Y | | | | | A | | |
| TadAC2.4 | pDKL-138; 2.4 | T | | | | R | | | | |
| TadAC2.5 | pDKL-139; 2.5 | | Y | | | W | | | | |
| TadAC2.6 | pDKL-140; 2.6 | | Y | | | | | | | |
| TadAC2.7 | pDKL-141; 2.7 | | Y | | | | | | | C |
| TadAC2.8 | pDKL-142; 2.8 | | Y | | | | | | | |
| TadAC2.9 | pDKL-143; 2.9 | K | | | | W | | | | |
| TadAC2.10 | pDKL-144; 2.10 | | G | | | R | | K | | |
| TadAC2.11 | pDKL-145; 2.11 | | H | | | | | | | |
| TadAC2.12 | pDKL-146; 2.12 | | | | | | | | | C |
| TadAC2.13 | pDKL-147; 2.13 | | Y | | | H | | | | |
| TadAC2.14 | pDKL-148; 2.14 | | | | | | | | | |
| TadAC2.15 | pDKL-149; 2.15 | | | | Q | R | | | | |
| TadAC2.16 | pDKL-150; 2.16 | | | | | H | | | | |
| TadAC2.17 | pDKL-151; 2.17 | | Y | | | | | | H | |
| TadAC2.18 | pDKL-152; 2.18 | | | | | W | | | | |
| TadAC2.19 | pDKL-153; 2.19 | | | | | | | | H | |
| TadAC2.20 | pDKL-154; 2.20 | | | | | | | | | |
| TadAC2.21 | pDKL-155; 2.21 | | Y | | | R | | | | |
| TadAC2.22 | pDKL-156; 2.22 | | | W | | H | | | | |
| TadAC2.23 | pDKL-157; 2.23 | S | | | | Y | | | | |
| TadAC2.24 | pDKL-158; 2.24 | | | | | | | | | |

| | | Residue identity (START Met is amino acid #1) | | | | | | | | |
|---|---|---|---|---|---|---|---|---|---|---|
| | Variant Name | | | | | | | | | |
| | Alternative Variant | | | | | | | | | |
| | Names | 119 | 122 | 127 | 143 | 147 | 158 | 159 | 162 | 166 |
| | Reference | | | | | | | | | |
| | 1.2 (see Table 6A) | D | H | N | A | R | A | Q | A | T |
| TadAC2.1 | pDKL-135; 2.1 | | | | | | | | | |
| TadAC2.2 | pDKL-136; 2.2 | | | | | | | | | |
| TadAC2.3 | pDKL-137; 2.3 | | R | | | | | | | |
| TadAC2.4 | pDKL-138; 2.4 | | G | | | | | | | |
| TadAC2.5 | pDKL-139; 2.5 | | | | | | | | | |
| TadAC2.6 | pDKL-140; 2.6 | N | | | | | | | | |
| TadAC2.7 | pDKL-141; 2.7 | | | | | | | | | |
| TadAC2.8 | pDKL-142; 2.8 | | | | | | | | | |
| TadAC2.9 | pDKL-143; 2.9 | | T | | | | | | | |
| TadAC2.10 | pDKL-144; 2.10 | | | | | | | | | |
| TadAC2.11 | pDKL-145; 2.11 | | N | | | | | | | |
| TadAC2.12 | pDKL-146; 2.12 | | | | | | | | | |
| TadAC2.13 | pDKL-147; 2.13 | | R | | | | | | | I |
| TadAC2.14 | pDKL-148; 2.14 | | | P | | | | | | |
| TadAC2.15 | pDKL-149; 2.15 | | | | | | | | | |
| TadAC2.16 | pDKL-150; 2.16 | | R | | | | V | | | |
| TadAC2.17 | pDKL-151; 2.17 | | | | | | | | | |
| TadAC2.18 | pDKL-152; 2.18 | | | | | | | | | |
| TadAC2.19 | pDKL-153; 2.19 | | G | | | | | | C | |
| TadAC2.20 | pDKL-154; 2.20 | | | | E | | | | | |
| TadAC2.21 | pDKL-155; 2.21 | | | | | | | | | |
| TadAC2.22 | pDKL-156; 2.22 | | G | | | | V | | | |
| TadAC2.23 | pDKL-157; 2.23 | | | | E | | | S | | |
| TadAC2.24 | pDKL-158; 2.24 | | | I | | | | | Q | |

TABLE 6D
Adenosine deaminase variants. Mutations are indicated with reference to TadA*8.20.

| AA Positions | 6 | 27 | 49 | 76 | 77 | 82 | 107 | 112 | 114 | 115 | 119 | 122 | 127 | 142 | 143 |
|---|---|---|---|---|---|---|---|---|---|---|---|---|---|---|---|
| TadA*8.20 | F | E | I | Y | D | S | R | G | A | G | D | H | N | A | A |
| S1.154 | F | H | K | Y | D | T | C | H | | M | | | | E | |
| Alterations | Y | | | W | G | | | | C | | N | G | P | | E |
| from Table 6C | | | | | | | | | | | | | | | |
| S2.1 | Y | H | K | W | | T | | H | | M | | | | E | |
| S2.2 | Y | H | K | | G | T | C | H | | M | | | | E | |
| S2.3 | Y | H | K | | | T | C | H | C | M | | | | E | |
| S2.4 | Y | H | K | | | T | C | H | | M | N | | | E | |
| S2.5 | Y | H | K | | | T | C | H | | M | | G | | E | |
| S2.6 | Y | H | K | | | T | C | H | | M | | | P | E | |
| S2.7 | Y | H | K | | | T | C | H | | M | | | | E | E |
| S2.8 | Y | H | K | | | T | C | H | | M | | | | A | E |
| S2.9 | Y | H | K | W | G | T | C | H | | M | | | | E | |
| S2.10 | Y | H | K | W | | T | C | H | C | M | | | | E | |
| S2.11 | Y | H | K | W | | T | C | H | | M | N | | | E | |
| S2.12 | Y | H | K | W | | T | C | H | | M | | G | | E | |
| S2.13 | Y | H | K | W | | T | C | H | | M | | | P | E | |
| TadA*8.20 | F | E | I | Y | D | S | R | G | A | G | D | H | N | A | A |
| S2.14 | Y | H | K | W | | T | C | H | | M | | | | E | E |
| S2.15 | Y | H | K | W | | T | C | H | | M | | | | A | E |
| S2.16 | Y | H | K | | G | T | C | H | C | M | | | | E | |
| S2.17 | Y | H | K | | | T | C | H | | M | N | | | E | |
| S2.18 | Y | H | K | | G | T | C | H | | M | | G | | E | |
| S2.19 | Y | H | K | | G | T | C | H | | M | | | P | E | |
| S2.20 | Y | H | K | | G | T | C | H | | M | | | | E | E |
| S2.21 | Y | H | K | | G | T | C | H | | M | | | | A | E |
| S2.22 | Y | H | K | | | T | C | H | C | M | N | | | E | |
| S2.23 | Y | H | K | | | T | C | H | C | M | | G | | E | |
| S2.24 | Y | H | K | | | T | C | H | C | M | | | P | E | |
| S2.25 | Y | H | K | | | T | C | H | | M | N | G | | E | |
| S2.26 | Y | H | K | | | T | C | H | | M | N | | P | E | |
| S2.27 | Y | H | K | | | T | C | H | | M | | G | P | E | |
| S2.28 | Y | H | K | W | G | T | C | H | C | M | | | | E | |
| S2.29 | Y | H | K | W | G | T | C | H | | M | N | | | E | |
| S2.30 | Y | H | K | W | G | T | C | H | | M | | G | | E | |
| S2.31 | Y | H | K | W | G | T | C | H | | M | | | P | E | |
| S2.32 | Y | H | K | W | G | T | C | H | | M | | | | E | E |
| S2.33 | Y | H | K | W | G | T | C | H | | M | | | | A | E |
| S2.34 | Y | H | K | W | | T | C | H | C | M | N | | | E | |
| S2.35 | Y | H | K | W | | | C | H | C | M | | G | | E | |
| S2.36 | Y | H | K | W | | T | C | H | C | M | | | P | E | |
| S2.37 | Y | H | K | W | | T | C | H | C | M | | | | E | E |
| S2.38 | Y | H | K | W | | T | C | H | C | M | | | | A | E |
| S2.39 | Y | H | K | W | | T | C | H | | M | N | G | | E | |
| S2.40 | Y | H | K | W | | T | C | H | | M | N | | P | E | |
| S2.41 | Y | H | K | W | | T | C | H | | M | | G | P | E | |
| S2.42 | Y | H | K | W | | T | C | H | C | M | N | G | | E | |
| S2.43 | Y | H | K | W | | T | C | H | C | M | N | | P | E | |
| S2.44 | Y | H | K | W | | T | C | H | C | M | | G | P | E | |
| S2.45 | Y | H | K | W | G | T | C | H | C | M | N | | | E | |
| S2.46 | Y | H | K | W | G | T | C | H | C | M | | G | | E | |
| S2.47 | Y | H | K | W | G | T | C | H | C | M | | | P | E | |
| S2.48 | Y | H | K | W | G | T | C | H | C | M | | | | E | E |
| S2.49 | Y | H | K | W | G | T | C | H | C | M | | | | A | E |
| TadA*8.20 | F | E | I | Y | D | S | R | G | A | G | D | H | N | A | A |
| S2.50 | Y | H | K | W | G | T | C | H | C | M | N | G | | E | |
| S2.51 | Y | H | K | W | G | T | C | H | C | M | N | | P | E | |
| S2.52 | Y | H | K | W | G | T | C | H | C | M | | G | P | E | |
| S2.53 | Y | H | K | W | | T | C | H | C | M | N | G | P | E | E |
| S2.54 | Y | H | K | W | | T | C | H | C | M | N | G | P | A | E |
| S2.55 | Y | H | K | W | G | T | C | H | C | M | N | G | P | E | E |
| S2.56 | Y | H | K | W | G | T | C | H | C | M | N | G | P | A | E |

TABLE 6E
Hybrid constructs. Mutations are indicated with reference to TadA*7.10.

| | TadA amino acid subsitutions | | | | | | | | | | | |
|---|---|---|---|---|---|---|---|---|---|---|---|---|
| | 76 | 82 | 109 | 111 | 119 | 122 | 123 | 147 | 149 | 154 | 166 | 167 |
| TadA*7.10 | I | V | A | T | D | H | Y | Y | F | Q | T | D |
| TadA*8e | | | S | R | N | N | | D | Y | | I | N |
| TadA*8.20 | Y | S | | | | | H | R | | R | | |
| TadA*8.17 | | S | | | | | | | | R | | |
| pNMG-B878 | Y | S | | | | | H | D | | R | | |
| pNMG-B879 | Y | S | | | | | H | R | Y | R | | |
| pNMG-B880 | Y | S | | | | | H | R | | R | I | |
| pNMG-B881 | Y | S | | | | | H | R | | R | | N |
| pNMG-B882 | Y | S | | | | | H | D | Y | R | T | N |
| pNMG-B883 | Y | S | | R | N | | H | R | | R | | |
| pNMG-B884 | Y | S | S | R | N | N | H | R | | R | | |
| pNMG-B885 | Y | S | S | | | | H | R | | R | | |
| pNMG-B886 | Y | S | | R | | | H | R | | R | | |
| pNMG-B887 | Y | S | | | N | | H | R | | R | | |
| pNMG-B888 | Y | S | | | | N | H | R | | R | | |
| pNMG-B889 | Y | S | S | R | | | H | R | | R | | |
| pNMG-B890 | Y | S | | | N | N | H | R | | R | | |
| pNMG-B891 | Y | S | S | R | N | N | H | D | Y | R | I | N |

TABLE 6F
Base editor variants. Mutations are indicated with reference to TadA*8.19/8.20.

| AA positions: | 17 | 27 | 48 | 49 | 76 | 82 | 84 | 118 | 142 | 147 | 149 | 166 | 167 |
|---|---|---|---|---|---|---|---|---|---|---|---|---|---|
| ABE8.19m/8.20m | T | E | A | I | Y/I | S | F | M | A | Y | F | T | D |
| 1.1 + 8e(B879) | | H | | | T | | M | | | | Y | | |
| 1.2 + 8e(B879) | | H | | K | I | | | | | | Y | | |
| 1.12 + 8e(B879) | A | H | | M | I | | | L | | | Y | | |
| 1.17 + 8e(B879) | A | | G | | | T | | | E | | Y | | |
| 1.18 + 8e(B879) | | G | | | | | | | | | Y | | |
| ABE8.19m/8.20m | T | E | A | I | Y/I | S | F | M | A | Y | F | T | D |
| 1.19 + 8e(B879) | | G | | N | | | | | | | Y | | |
| 1.1 + 8e(B882) | | H | | | I | | M | | | D | Y | I | N |
| 1.2 + 8e(B882) | | H | | K | I | | | | | D | Y | I | N |
| 1.12 + 8e(B882) | A | H | | M | I | | | L | | D | Y | I | N |
| 1.17 + 8e(B882) | A | | G | | | T | | | E | D | Y | I | N |
| 1.18 + 8e(B882) | | G | | | | | | | | D | Y | I | N |
| 1.19 + 8e(B882) | | G | | N | | | | | | D | Y | I | N |

### Guide Polynucleotides

[0300] A polynucleotide programmable nucleotide binding domain, when in conjunction with a bound guide polynucleotide (e.g., gRNA), can specifically bind to a target polynucleotide sequence (i.e., via complementary base pairing between bases of the bound guide nucleic acid and bases of the target polynucleotide sequence) and thereby localize the base editor to the target nucleic acid sequence desired to be edited. In some embodiments, the target polynucleotide sequence comprises single-stranded DNA or double-stranded DNA. In some embodiments, the target polynucleotide sequence comprises RNA. In some embodiments, the target polynucleotide sequence comprises a DNA-RNA hybrid.

[0301] In an embodiment, a guide polynucleotide described herein can be RNA or DNA. In one embodiment, the guide polynucleotide is a gRNA.

[0302] In some embodiments, the guide polynucleotide is at least one single guide RNA (“sgRNA” or “gRNA”). In some embodiments, a guide polynucleotide comprises two or more individual polynucleotides, which can interact with one another via for example complementary base pairing (e.g., a dual guide polynucleotide, dual gRNA). For example, a guide polynucleotide can comprise a CRISPR RNA (crRNA) and a trans-activating CRISPR RNA (tracrRNA) or can comprise one or more trans-activating CRISPR RNA (tracrRNA).

[0303] A guide polynucleotide may include natural or non-natural (or unnatural) nucleotides (e.g., peptide nucleic acid or nucleotide analogs). In some cases, the targeting region of a guide nucleic acid sequence (e.g., a spacer) can be at least 15, 16, 17, 18, 19, 20, 21, 22, 23, 24, 25, 26, 27, 28, 29, or 30 nucleotides in length.

In some embodiments, the methods described herein can utilize an engineered Cas protein. A guide RNA (gRNA) is a short synthetic RNA composed of a scaffold sequence necessary for Cas-binding and a user-defined ˜20 nucleotide spacer that defines the genomic target to be modified. Exemplary gRNA scaffold sequences are provided in the sequence listing as SEQ ID NOs: 317-327 and 425. Thus, a skilled artisan can change the genomic target of the Cas protein specificity is partially determined by how specific the gRNA targeting sequence is for the genomic target compared to the rest of the genome. In embodiments, the spacer is about 10, 11, 12, 13, 14, 15, 16, 17, 18, 19, 20, 22, 23, 24, 25, or more nucleotides in length. The spacer of a gRNA can be or can be about 19, 20, or 21 nucleotides in length.

[0304] A gRNA or a guide polynucleotide can target any exon or intron of a gene target. In some embodiments, a composition comprises multiple gRNAs that all target the same exon or multiple gRNAs that target different exons. An exon and/or an intron of a gene can be targeted. A gRNA or a guide polynucleotide can target a nucleic acid sequence of about 20 nucleotides or less than about 20 nucleotides (e.g., at least about 5, 10, 15, 16, 17, 18, 19, 20, 21, 22, 23, 24, 25, 30 nucleotides), or anywhere between about 1-100 nucleotides (e.g., 5, 10, 15, 16, 17, 18, 19, 20, 21, 22, 23, 24, 25, 30, 40, 50, 60, 70, 80, 90, 100). A target nucleic acid sequence can be or can be about 20 bases immediately 5′ of the first nucleotide of the PAM. A gRNA can target a nucleic acid sequence. A target nucleic acid can be at least or at least about 1-10, 1-20, 1-30, 1-40, 1-50, 1-60, 1-70, 1-80, 1-90, or 1-100 nucleotides.

[0305] The guide polynucleotides can comprise standard ribonucleotides, modified ribonucleotides (e.g., pseudouridine), ribonucleotide isomers, and/or ribonucleotide analogs.

[0306] In some embodiments, a base editor system may comprise multiple guide polynucleotides, e.g., gRNAs. For example, the gRNAs may target to one or more target loci (e.g., at least 1 gRNA, at least 2 gRNA, at least 5 gRNA, at least 10 gRNA, at least 20 gRNA, at least 30 g RNA, at least 50 gRNA) comprised in a base editor system. The multiple gRNA sequences can be tandemly arranged and may be separated by a direct repeat.

### Modified Polynucleotides

[0307] To enhance expression, stability, and/or genomic/base editing efficiency, and/or reduce possible toxicity, the base editor-coding sequence (e.g., mRNA) and/or the guide polynucleotide (e.g., gRNA) can be modified to include one or more modified nucleotides and/or chemical modifications, e.g. using pseudo-uridine, 5-Methyl-cytosine, 2′-O-methyl-3′-phosphonoacetate, 2′-O-methyl thioPACE (MSP), 2′-O-methyl-PACE (MP), 2′-fluoro RNA (2′-F-RNA), =constrained ethyl (S-cEt), 2′-O-methyl (‘M’), 2′-O-methyl-3′-phosphorothioate (‘MS’), 2′-O-methyl-3′-thiophosphonoacetate (‘MSP’), 5-methoxyuridine, phosphorothioate, and N1-Methylpseudouridine. Chemically protected gRNAs can enhance stability and editing efficiency in vivo and ex vivo. Methods for using chemically modified mRNAs and guide RNAs are known in the art and described, for example, by Jiang et al., Chemical modifications of adenine base editor mRNA and guide RNA expand its application scope. Nat Commun 11, 1979 (2020). doi.org/10.1038/s41467-020-15892-8, Callum et al., N1-Methylpseudouridine substitution enhances the performance of synthetic mRNA switches in cells, Nucleic Acids Research, Volume 48, Issue 6, 6 Apr. 2020, Page e35, and Andries et al., Journal of Controlled Release, Volume 217, 10 Nov. 2015, Pages 337-344, each of which is incorporated herein by reference in its entirety.

[0308] In some embodiments, the guide polynucleotide comprises one or more modified nucleotides at the 5′ end and/or the 3′ end of the guide. In some embodiments, the guide polynucleotide comprises two, three, four or more modified nucleosides at the 5′ end and/or the 3′ end of the guide. In some embodiments, the guide polynucleotide comprises two, three, four or more modified nucleosides at the 5′ end and/or the 3′ end of the guide.

[0309] In some embodiments, the guide comprises at least about 50%-75% modified nucleotides. In some embodiments, the guide comprises at least about 85% or more modified nucleotides. In some embodiments, at least about 1-5 nucleotides at the 5′ end of the gRNA are modified and at least about 1-5 nucleotides at the 3′ end of the gRNA are modified. In some embodiments, at least about 3-5 contiguous nucleotides at each of the 5′ and 3′ termini of the gRNA are modified. In some embodiments, at least about 20% of the nucleotides present in a direct repeat or anti-direct repeat are modified. In some embodiments, at least about 50% of the nucleotides present in a direct repeat or anti-direct repeat are modified. In some embodiments, at least about 50-75% of the nucleotides present in a direct repeat or anti-direct repeat are modified. In some embodiments, at least about 100 of the nucleotides present in a direct repeat or anti-direct repeat are modified. In some embodiments, at least about 20% or more of the nucleotides present in a hairpin present in the gRNA scaffold are modified. In some embodiments, at least about 50% or more of the nucleotides present in a hairpin present in the gRNA scaffold are modified. In some embodiments, the guide comprises a variable length spacer. In some embodiments, the guide comprises a 20-40 nucleotide spacer. In some embodiments, the guide comprises a spacer comprising at least about 20-25 nucleotides or at least about 30-35 nucleotides. In some embodiments, the spacer comprises modified nucleotides. In some embodiments, the guide comprises two or more of the following:
[0310] at least about 1-5 nucleotides at the 5′ end of the gRNA are modified and at least about 1-5 nucleotides at the 3′ end of the gRNA are modified;
[0311] at least about 20% of the nucleotides present in a direct repeat or anti-direct repeat are modified;
[0312] at least about 50-75% of the nucleotides present in a direct repeat or anti-direct repeat are modified;
[0313] at least about 20% or more of the nucleotides present in a hairpin present in the gRNA scaffold are modified;
[0314] a variable length spacer; and
[0315] a spacer comprising modified nucleotides.

[0316] In embodiments, the gRNA contains numerous modified nucleotides and/or chemical modifications (“heavy mods”). Such heavy mods can increase base editing ˜2 fold in vivo or in vitro. In embodiments, the gRNA comprises 2′-O-methyl or phosphorothioate modifications. In an embodiment, the gRNA comprises 2′-O-methyl and phosphorothioate modifications. In an embodiment, the modifications increase base editing by at least about 2 fold.

[0317] A guide polynucleotide can comprise one or more modifications to provide a nucleic acid with a new or enhanced feature. A guide polynucleotide can comprise a nucleic acid affinity tag. A guide polynucleotide can comprise synthetic nucleotide, synthetic nucleotide analog, nucleotide derivatives, and/or modified nucleotides.

[0318] A gRNA or a guide polynucleotide can also be modified by 5′ adenylate, 5′ guanosine-triphosphate cap, 5′ N7-Methylguanosine-triphosphate cap, 5′ triphosphate cap, 3′ phosphate, 3′ thiophosphate, 5′ phosphate, 5′ thiophosphate, Cis-Syn thymidine dimer, trimers, C12 spacer, C3 spacer, C6 spacer, dSpacer, PC spacer, rSpacer, Spacer 18, Spacer 9, 3′-3′ modifications, 2′-O-methyl thioPACE (MSP), 2′-O-methyl-PACE (MP), and constrained ethyl (S-cEt), 5′-5′ modifications, abasic, acridine, azobenzene, biotin, biotin BB, biotin TEG, cholesteryl TEG, desthiobiotin TEG, DNP TEG, DNP-X, DOTA, dT-Biotin, dual biotin, PC biotin, psoralen C2, psoralen C6, TINA, 3′ DABCYL, black hole quencher 1, black hole quencher 2, DABCYL SE, dT-DABCYL, IRDye QC-1, QSY-21, QSY-35, QSY-7, QSY-9, carboxyl linker, thiol linkers, 2′-deoxyribonucleoside analog purine, 2′-deoxyribonucleoside analog pyrimidine, ribonucleoside analog, 2′-O-methyl ribonucleoside analog, sugar modified analogs, wobble/universal bases, fluorescent dye label, 2′-fluoro RNA, 2′-O-methyl RNA, methylphosphonate, phosphodiester DNA, phosphodiester RNA, phosphothioate DNA, phosphorothioate RNA, UNA, pseudouridine-5′-triphosphate, 5′-methylcytidine-5′-triphosphate, or any combination thereof.

[0319] In some cases, a phosphorothioate enhanced RNA gRNA can inhibit RNase A, RNase T1, calf serum nucleases, or any combinations thereof. These properties can allow the use of PS-RNA gRNAs to be used in applications where exposure to nucleases is of high probability in vivo or in vitro. For example, phosphorothioate (PS) bonds can be introduced between the last 3-5 nucleotides at the 5′- or 3′-end of a gRNA which can inhibit exonuclease degradation. In some cases, phosphorothioate bonds can be added throughout an entire gRNA to reduce attack by endonucleases.

### Fusion Proteins or Complexes Comprising a Nuclear Localization Sequence (NLS)

[0320] In some embodiments, the fusion proteins or complexes provided herein further comprise one or more (e.g., 2, 3, 4, 5) nuclear targeting sequences, for example a nuclear localization sequence (NLS). In one embodiment, a bipartite NLS is used. In some embodiments, a NLS comprises an amino acid sequence that facilitates the importation of a protein, that comprises an NLS, into the cell nucleus (e.g., by nuclear transport). In some embodiments, the NLS is fused to the N-terminus or the C-terminus of the fusion protein. In some embodiments, the NLS is fused to the C-terminus or N-terminus of an nCas9 domain or a dCas9 domain. In some embodiments, the NLS is fused to the N-terminus or C-terminus of the Cas12 domain. In some embodiments, the NLS is fused to the N-terminus or C-terminus of the cytidine or adenosine deaminase. In some embodiments, the NLS is fused to the fusion protein via one or more linkers. In some embodiments, the NLS is fused to the fusion protein without a linker. In some embodiments, the NLS comprises an amino acid sequence of any one of the NLS sequences provided or referenced herein. Additional nuclear localization sequences are known in the art and would be apparent to the skilled artisan. For example, NLS sequences are described in Plank et al., PCT/EP2000/011690, the contents of which are incorporated herein by reference for their disclosure of exemplary nuclear localization sequences.

[0321] In some embodiments, the NLS is present in a linker or the NLS is flanked by linkers, for example described herein. A bipartite NLS comprises two basic amino acid clusters, which are separated by a relatively short spacer sequence (hence bipartite—2 parts, while monopartite NLSs are not). The NLS of nucleoplasmin, KR[PAATKKAGQA]KKKK (SEQ ID NO: 191), is the prototype of the ubiquitous bipartite signal: two clusters of basic amino acids, separated by a spacer of about 10 amino acids. The sequence of an exemplary bipartite NLS follows:

(SEQ ID NO: 328)
PKKKRKVEGADKRTADGSEFESPKKKRKV.

[0322] In some embodiments, any of the fusion proteins or complexes provided herein comprise an NLS comprising the amino acid sequence EGADKRTADGSEFESPKKKRKV (amino acids 8 to 29 of SEQ ID NO 328). In some embodiments, any of the adenosine base editors provided herein, for example ABE Variant A, ABE Variant B, ABE Variant C, ABE Variant D, ABE Variant E, ABE Variant F, ABE Variant G, ABE Variant H, ABE Variant I, ABE Variant J, ABE Variant K, or ABE Variant D comprise an NLS comprising the amino acid sequence EGADKRTADGSEFESPKKKRKV (amino acids 8 to 29 of SEQ ID NO: 328). In some embodiments, the NLS is at a C-terminal portion of the adenosine base editor. In some embodiments, the NLS is at the C-terminus of the adenosine base editor.

### Additional Domains

[0323] A base editor described herein can include any domain which helps to facilitate the nucleobase editing, modification or altering of a nucleobase of a polynucleotide. In some embodiments, a base editor comprises a polynucleotide programmable nucleotide binding domain (e.g., Cas9), a nucleobase editing domain (e.g., deaminase domain), and one or more additional domains. In some embodiments, the additional domain can facilitate enzymatic or catalytic functions of the base editor, binding functions of the base editor, or be inhibitors of cellular machinery (e.g., enzymes) that could interfere with the desired base editing result. In some embodiments, a base editor comprises a nuclease, a nickase, a recombinase, a deaminase, a methyltransferase, a methylase, an acetylase, an acetyltransferase, a transcriptional activator, or a transcriptional repressor domain.

[0324] In some embodiments, a base editor comprises an uracil glycosylase inhibitor (UGI) domain. In some embodiments, cellular DNA repair response to the presence of U: G heteroduplex DNA can be responsible for a decrease in nucleobase editing efficiency in cells. In such embodiments, uracil DNA glycosylase (UDG) can catalyze removal of U from DNA in cells, which can initiate base excision repair (BER), mostly resulting in reversion of the U:G pair to a C:G pair. In such embodiments, BER can be inhibited in base editors comprising one or more domains that bind the single strand, block the edited base, inhibit UGI, inhibit BER, protect the edited base, and/or promote repairing of the non-edited strand. Thus, this disclosure contemplates a base editor fusion protein or complex comprising a UGI domain and/or a uracil stabilizing protein (USP) domain.

### Base Editor System

[0325] Provided herein are systems, compositions, and methods for editing a nucleobase using a base editor system. In some embodiments, the base editor system comprises (1) a base editor (BE) comprising a polynucleotide programmable nucleotide binding domain and a nucleobase editing domain (e.g., a deaminase domain) for editing the nucleobase; and (2) a guide polynucleotide (e.g., guide RNA) in conjunction with the polynucleotide programmable nucleotide binding domain. In some embodiments, the base editor system is a cytidine base editor (CBE) or an adenosine base editor (ABE). In some embodiments, the polynucleotide programmable nucleotide binding domain is a polynucleotide programmable DNA or RNA binding domain. In some embodiments, the nucleobase editing domain is a deaminase domain. In some embodiments, a deaminase domain can be a cytidine deaminase or an cytosine deaminase. In some embodiments, a deaminase domain can be an adenine deaminase or an adenosine deaminase. In some embodiments, the adenosine base editor can deaminate adenine in DNA. In some embodiments, the base editor is capable of deaminating a cytidine in DNA.

[0326] Use of the base editor system provided herein comprises the steps of: (a) contacting a target nucleotide sequence of a polynucleotide (e.g., double- or single stranded DNA or RNA) of a subject with a base editor system comprising a nucleobase editor (e.g., an adenosine base editor or a cytidine base editor) and a guide polynucleotide (e.g., gRNA), wherein the target nucleotide sequence comprises a targeted nucleobase pair; (b) inducing strand separation of said target region; (c) converting a first nucleobase of said target nucleobase pair in a single strand of the target region to a second nucleobase; and (d) cutting no more than one strand of said target region, where a third nucleobase complementary to the first nucleobase base is replaced by a fourth nucleobase complementary to the second nucleobase. It should be appreciated that in some embodiments, step (b) is omitted. In some embodiments, said targeted nucleobase pair is a plurality of nucleobase pairs in one or more genes. In some embodiments, the base editor system provided herein is capable of multiplex editing of a plurality of nucleobase pairs in one or more genes. In some embodiments, the plurality of nucleobase pairs is located in the same gene. In some embodiments, the plurality of nucleobase pairs is located in one or more genes, wherein at least one gene is located in a different locus.

[0327] The components of a base editor system (e.g., a deaminase domain, a guide RNA, and/or a polynucleotide programmable nucleotide binding domain) may be associated with each other covalently or non-covalently. For example, in some embodiments, the deaminase domain can be targeted to a target nucleotide sequence by a polynucleotide programmable nucleotide binding domain, optionally where the polynucleotide programmable nucleotide binding domain is complexed with a polynucleotide (e.g., a guide RNA). In some embodiments, a polynucleotide programmable nucleotide binding domain can be fused or linked to a deaminase domain. In some embodiments, a polynucleotide programmable nucleotide binding domain can target a deaminase domain to a target nucleotide sequence by non-covalently interacting with or associating with the deaminase domain. For example, in some embodiments, the nucleobase editing component (e.g., the deaminase component) comprises an additional heterologous portion or domain that is capable of interacting with, associating with, or capable of forming a complex with a corresponding heterologous portion, antigen, or domain that is part of a polynucleotide programmable nucleotide binding domain and/or a guide polynucleotide (e.g., a guide RNA) complexed therewith. In some embodiments, the polynucleotide programmable nucleotide binding domain, and/or a guide polynucleotide (e.g., a guide RNA) complexed therewith, comprises an additional heterologous portion or domain that is capable of interacting with, associating with, or capable of forming a complex with a corresponding heterologous portion, antigen, or domain that is part of a nucleobase editing domain (e.g., the deaminase component). In some embodiments, the additional heterologous portion may be capable of binding to, interacting with, associating with, or forming a complex with a polypeptide. In some embodiments, the additional heterologous portion may be capable of binding to, interacting with, associating with, or forming a complex with a polynucleotide. In some embodiments, the additional heterologous portion may be capable of binding to a guide polynucleotide. In some embodiments, the additional heterologous portion may be capable of binding to a polypeptide linker. In some embodiments, the additional heterologous portion is capable of binding to a polynucleotide linker. An additional heterologous portion may be a protein domain. In some embodiments, an additional heterologous portion comprises a polypeptide, such as a 22 amino acid RNA-binding domain of the lambda bacteriophage antiterminator protein N (N22p), a 2G12 IgG homodimer domain, an ABI, an antibody (e.g. an antibody that binds a component of the base editor system or a heterologous portion thereof) or fragment thereof (e.g. heavy chain domain 2 (CH2) of IgM (MHD2) or IgE (EHD2), an immunoglobulin Fc region, a heavy chain domain 3 (CH3) of IgG or IgA, a heavy chain domain 4 (CH4) of IgM or IgE, an Fab, an Fab2, miniantibodies, and/or ZIP antibodies), a barnase-barstar dimer domain, a Bcl-xL domain, a Calcineurin A (CAN) domain, a Cardiac phospholamban transmembrane pentamer domain, a collagen domain, a Com RNA binding protein domain (e.g. SfMu Com coat protein domain, and SfMu Com binding protein domain), a Cyclophilin-Fas fusion protein (CyP-Fas) domain, a Fab domain, an Fe domain, a fibritin foldon domain, an FK506 binding protein (FKBP) domain, an FKBP binding domain (FRB) domain of mTOR, a foldon domain, a fragment X domain, a GAI domain, a GID1 domain, a Glycophorin A transmembrane domain, a GyrB domain, a Halo tag, an HIV Gp41 trimerisation domain, an HPV45 oncoprotein E7 C-terminal dimer domain, a hydrophobic polypeptide, a K Homology (KH) domain, a Ku protein domain (e.g., a Ku heterodimer), a leucine zipper, a LOV domain, a mitochondrial antiviral-signaling protein CARD filament domain, an MS2 coat protein domain (MCP), a non-natural RNA aptamer ligand that binds a corresponding RNA motif/aptamer, a parathyroid hormone dimerization domain, a PP7 coat protein (PCP) domain, a PSD95-Dlgl-zo-1 (PDZ) domain, a PYL domain, a SNAP tag, a SpyCatcher moiety, a SpyTag moiety, a streptavidin domain, a streptavidin-binding protein domain, a streptavidin binding protein (SBP) domain, a telomerase Sm7 protein domain (e.g. Sm7 homoheptamer or a monomeric Sm-like protein), and/or fragments thereof. In embodiments, an additional heterologous portion comprises a polynucleotide (e.g., an RNA motif), such as an MS2 phage operator stem-loop (e.g., an MS2, an MS2 C-5 mutant, or an MS2 F-5 mutant), a non-natural RNA motif, a PP7 operator stem-loop, an SfMu phate Com stem-loop, a sterile alpha motif, a telomerase Ku binding motif, a telomerase Sm7 binding motif, and/or fragments thereof. Non-limiting examples of additional heterologous portions include polypeptides with at least about 85% sequence identity to any one or more of SEQ ID NOs: 380, 382, 384, 386-388, or fragments thereof. Non-limiting examples of additional heterologous portions include polynucleotides with at least about 85% sequence identity to any one or more of SEQ ID NOs: 379, 381, 383, 385, or fragments thereof.

[0328] In some instances, components of the base editing system are associated with one another through the interaction of leucine zipper domains (e.g., SEQ ID NOs: 387 and 388). In some cases, components of the base editing system are associated with one another through polypeptide domains (e.g., FokI domains) that associate to form protein complexes containing about, at least about, or no more than about 1, 2 (i.e., dimerize), 3, 4, 5, 6, 7, 8, 9, polypeptide domain units, optionally the polypeptide domains may include alterations that reduce or eliminate an activity thereof.

[0329] In some instances, components of the base editing system are associated with one another through the interaction of multimeric antibodies or fragments thereof (e.g., IgG, IgD, IgA, IgM, IgE, a heavy chain domain 2 (CH2) of IgM (MHD2) or IgE (EHD2), an immunoglobulin Fc region, a heavy chain domain 3 (CH3) of IgG or IgA, a heavy chain domain 4 (CH4) of IgM or IgE, an Fab, and an Fab2). In some instances, the antibodies are dimeric, trimeric, or tetrameric. In embodiments, the dimeric antibodies bind a polypeptide or polynucleotide component of the base editing system.

[0330] In some cases, components of the base editing system are associated with one another through the interaction of a polynucleotide-binding protein domain(s) with a polynucleotide(s). In some instances, components of the base editing system are associated with one another through the interaction of one or more polynucleotide-binding protein domains with polynucleotides that are self-complementary and/or complementary to one another so that complementary binding of the polynucleotides to one another brings into association their respective bound polynucleotide-binding protein domain(s).

[0331] In some instances, components of the base editing system are associated with one another through the interaction of a polypeptide domain(s) with a small molecule(s) (e.g., chemical inducers of dimerization (CIDs), also known as “dimerizers”). Non-limiting examples of CIDs include those disclosed in Amara, et al., “A versatile synthetic dimerizer for the regulation of protein-protein interactions,” PNAS, 94:10618-10623 (1997); and Voß, et al. “Chemically induced dimerization: reversible and spatiotemporal control of protein function in cells,” Current Opinion in Chemical Biology, 28:194-201 (2015), the disclosures of each of which are incorporated herein by reference in their entireties for all purposes. In some embodiments, the base editor inhibits base excision repair (BER) of the edited strand. In some embodiments, the base editor protects or binds the non-edited strand. In some embodiments, the base editor comprises UGI activity or USP activity. In some embodiments, the base editor comprises a catalytically inactive inosine-specific nuclease.

[0332] The base editors of the present disclosure can comprise any domain, feature or amino acid sequence which facilitates the editing of a target polynucleotide sequence. For example, in some embodiments, the base editor comprises a nuclear localization sequence (NLS). In some embodiments, an NLS of the base editor is localized between a deaminase domain and a polynucleotide programmable nucleotide binding domain. In some embodiments, an NLS of the base editor is localized C-terminal to a polynucleotide programmable nucleotide binding domain.

[0333] Protein domains included in the fusion protein can be a heterologous functional domain. Non-limiting examples of protein domains which can be included in the fusion protein include a deaminase domain (e.g., cytidine deaminase and/or adenosine deaminase), a uracil glycosylase inhibitor (UGI) domain, epitope tags, and reporter gene sequences. In some embodiments, the adenosine base editor (ABE) can deaminate adenine in DNA. In some embodiments, ABE is generated by replacing APOBEC1 component of BE3 with natural or engineered E. coli TadA, human ADAR2, mouse ADA, or human ADAT2. In some embodiments, ABE comprises an evolved TadA variant. In some embodiments, the base editor is ABE8.1, which comprises or consists essentially of the following sequence or a fragment thereof having adenosine deaminase activity: SEQ ID NO: 331. Other ABE8 sequences are provided in the attached sequence listing (SEQ ID NOs: 332-354).

[0334] In some embodiments, the base editor includes an adenosine deaminase variant comprising an amino acid sequence, which contains alterations relative to an ABE 7*10 reference sequence, as described herein. The term “monomer” as used in Table 7 refers to a monomeric form of TadA*7.10 comprising the alterations described. The term “heterodimer” as used in Table 7 refers to the specified wild-type E. coli TadA adenosine deaminase fused to a TadA*7.10 comprising the alterations as described.

TABLE 7
Adenosine Deaminase Base Editor Variants

| | Adenosine | |
|---|---|---|
| ABE | Deaminase | Adenosine Deaminase Description |
| ABE-605m | MSP605 | monomer_TadA*7.10 + V82G + Y147T + |
| | | Q154S |
| ABE-680m | MSP680 | monomer_TadA*7.10 + I76Y + V82G + |
| | | Y147T + Q154S |
| ABE-823m | MSP823 | monomer_TadA*7.10 + L36H + V82G + |
| | | Y147T + Q154S + N157K |
| ABE-824m | MSP824 | monomer_TadA*7.10 + V82G + Y147D + |
| | | F149Y + Q154S + D167N |
| ABE-825m | MSP825 | monomer_TadA*7.10 + L36H + V82G + |
| | | Y147D + F149Y + Q154S + N157K + |
| | | D167N |
| ABE-827m | MSP827 | monomer_TadA*7.10 + L36H + I76Y + |
| | | V82G + Y147T + Q154S + N157K |
| ABE-828m | MSP828 | monomer_TadA*7.10 + I76Y + V82G + |
| | | Y147D + F149Y + Q154S + D167N |
| ABE-829m | MSP829 | monomer_TadA*7.10 + L36H + I76Y + |
| | | V82G + Y147D + F149Y + Q154S + |
| | | N157K + D167N |
| ABE-605d | MSP605 | heterodimer_(WT) + (TadA*7.10 + V82G + |
| | | Y147T + Q154S) |
| ABE-680d | MSP680 | heterodimer_(WT) + (TadA*7.10 + I76Y + |
| | | V82G + Y147T + Q154S) |
| ABE-823d | MSP823 | heterodimer_(WT) + (TadA*7.10 + L36H + |
| | | V82G + Y147T + Q154S + N157K) |
| ABE-824d | MSP824 | heterodimer_(WT) + (TadA*7.10 + V82G + |
| | | Y147D + F149Y + Q154S + D167N) |
| ABE-825d | MSP825 | heterodimer_(WT) + (TadA*7.10 + L36H + |
| | | V82G + Y147D + F149Y + Q154S + |
| | | N157K + D167N) |
| ABE-827d | MSP827 | heterodimer_(WT) + (TadA*7.10 + L36H + |
| | | I76Y + V82G + Y147T + Q154S + N157K) |
| ABE-828d | MSP828 | heterodimer_(WT) + (TadA*7.10 + I76Y + |
| | | V82G + Y147D + F149Y + Q154S + |
| | | D167N) |
| ABE-829d | MSP829 | heterodimer_(WT) + (TadA*7.10 + L36H + |
| | | I76Y + V82G + Y147D + F149Y + |
| | | Q154S + N157K + D167N) |

[0335] In some embodiments, the base editor comprises a domain comprising all or a portion (e.g., a functional portion) of a uracil glycosylase inhibitor (UGI) or a uracil stabilizing protein (USP) domain.

### Linkers

[0336] In certain embodiments, linkers may be used to link any of the peptides or peptide domains of the disclosure. The linker may be as simple as a covalent bond, or it may be a polymeric linker many atoms in length. In certain embodiments, the linker is a polypeptide or based on amino acids. In other embodiments, the linker is not peptide-like. In certain embodiments, the linker is a covalent bond (e.g., a carbon-carbon bond, disulfide bond, carbon-heteroatom bond, etc.).

[0337] In some embodiments, any of the fusion proteins provided herein, comprise a cytidine or adenosine deaminase and a Cas9 domain that are fused to each other via a linker. Various linker lengths and flexibilities between the cytidine or adenosine deaminase and the Cas9 domain can be employed (e.g., ranging from very flexible linkers of the form (GGGS) n (SEQ ID NO: 246), (GGGGS)ₙ (SEQ ID NO: 247), and (G)ₙ to more rigid linkers of the form (EAAAK)ₙ (SEQ ID NO: 248), (SGGS)ₙ (SEQ ID NO: 355), SGSETPGTSESATPES (SEQ ID NO: 249) (see, e.g., Guilinger J P, et al. Fusion of catalytically inactive Cas9 to FokI nuclease improves the specificity of genome modification. Nat. Biotechnol. 2014; 32(6): 577-82; the entire contents are incorporated herein by reference) and (XP)ₙ) in order to achieve the optimal length for activity for the cytidine or adenosine deaminase nucleobase editor. In some embodiments, n is 1, 2, 3, 4, 5, 6, 7, 8, 9, 10, 11, 12, 13, 14, or 15. In some embodiments, the linker comprises a (GGS)n motif, wherein n is 1, 3, or 7. In some embodiments, cytidine deaminase or adenosine deaminase and the Cas9 domain of any of the fusion proteins provided herein are fused via a linker comprising the amino acid sequence SGSETPGTSESATPES (SEQ ID NO: 249), which can also be referred to as the XTEN linker.

[0338] In some embodiments, the domains of the base editor are fused via a linker that comprises the amino acid sequence of:

(SEQ ID NO: 356)
SGGSSGSETPGTSESATPESSGGS,
(SEQ ID NO: 357)
SGGSSGGSSGSETPGTSESATPESSGGSSGGS,
or
(SEQ ID NO: 358)
GGSGGSPGSPAGSPTSTEEGTSESATPESGPGTSTEPSEGSAPGSPAGS
PTSTEEGTSTEPSEGSAPGTSTEPSEGSAPGTSESATPESGPGSEPATS
GGSGGS.

[0339] In some embodiments, domains of the base editor are fused via a linker comprising the amino acid sequence SGSETPGTSESATPES (SEQ ID NO: 249), which may also be referred to as the XTEN linker. In some embodiments, a linker comprises the amino acid sequence SGGS (SEQ ID NO: 355). In some embodiments, the linker is 24 amino acids in length. In some embodiments, the linker comprises the amino acid sequence SGGSSGGSSGSETPGTSESATPES (SEQ ID NO: 359). In some embodiments, the linker is amino acids in length. In some embodiments, the linker comprises the amino acid sequence: SGGSSGGSSGSETPGTSESATPESSGGSSGGSSGGSSGGS (SEQ ID NO: 360). In some embodiments, the linker is 64 amino acids in length. In some embodiments, the linker comprises the amino acid sequence: SGGSSGGSSGSETPGTSESATPESSGGSSGGSSGGSSGGSSGSETPGTSESATPESSGGSSG GS (SEQ ID NO: 361). In some embodiments, the linker is 92 amino acids in length. In some embodiments, the linker comprises the amino acid sequence:

(SEQ ID NO: 362)
PGSPAGSPTSTEEGTSESATPESGPGTSTEPSEGSAPGSPAGSPTSTEE
GTSTEPSEGSAPGTSTEPSEGSAPGTSESATPESGPGSEPATS.

In some embodiments, a linker comprises a plurality of proline residues and is 5-21, 5-14, 5-9, 5-7 amino acids in length, e.g., PAPAP (SEQ ID NO: 363), PAPAPA (SEQ ID NO: 364), PAPAPAP (SEQ ID NO: 365), PAPAPAPA (SEQ ID NO: 366), P(AP)4 (SEQ ID NO: 367), P(AP)7 (SEQ ID NO: 368), P(AP)10 (SEQ ID NO: 369) (see, e.g., Tan J, Zhang F, Karcher D, Bock R. Engineering of high-precision base editors for site-specific single nucleotide replacement. Nat Commun. 2019 Jan. 25; 10(1):439; the entire contents are incorporated herein by reference). Such proline-rich linkers are also termed “rigid” linkers.
Nucleic Acid Programmable DNA Binding Proteins with Guide RNAs

[0340] Provided herein are compositions and methods for base editing in cells. Further provided herein are compositions comprising a guide polynucleotide sequence, e.g., a guide RNA sequence, or a combination of 2, 3, 4, 5, 6, 7, 8, 9, 10, 11, 12, 13, 14, 15, 16, 17, 18, 19, 20, or more guide RNAs as provided herein. In some embodiments, a composition for base editing as provided herein further comprises a polynucleotide that encodes a base editor, e.g., a C-base editor or an A-base editor. For example, a composition for base editing may comprise a mRNA sequence encoding a BE, a BE4, an ABE, and a combination of one or more guide RNAs as provided. A composition for base editing may comprise a base editor polypeptide and a combination of one or more of any guide RNAs provided herein. Such a composition may be used to effect base editing in a cell through different delivery approaches, for example, electroporation, nucleofection, viral transduction or transfection. In some embodiments, the composition for base editing comprises an mRNA sequence that encodes a base editor and a combination of one or more guide RNA sequences provided herein for electroporation.

[0341] Some aspects of this disclosure provide systems comprising any of the fusion proteins or complexes provided herein, and a guide RNA bound to a nucleic acid programmable DNA binding protein (napDNAbp) domain (e.g., a Cas9 (e.g., a dCas9, a nuclease active Cas9, or a Cas9 nickase) or Cas12) of the fusion protein or complex. These complexes are also termed ribonucleoproteins (RNPs). In some embodiments, the guide nucleic acid (e.g., guide RNA) is from 15-100 nucleotides long and comprises a sequence of at least 10 contiguous nucleotides that is complementary to a target sequence. In some embodiments, the target sequence is a DNA sequence. In some embodiments, the target sequence is an RNA sequence. In some embodiments, the target sequence is a sequence in the genome of a bacteria, yeast, fungi, insect, plant, or animal. In some embodiments, the target sequence is a sequence in the genome of a human. In some embodiments, the 3′ end of the target sequence is immediately adjacent to a canonical PAM sequence (NGG). In some embodiments, the 3′ end of the target sequence is immediately adjacent to a non-canonical PAM sequence (e.g., a sequence listed in Table 3 or 5′-NAA-3′). In some embodiments, the guide nucleic acid (e.g., guide RNA) is complementary to a sequence in a gene of interest (e.g., a gene associated with a disease or disorder).

[0342] Some aspects of this disclosure provide methods of using the fusion proteins, or complexes provided herein. For example, some aspects of this disclosure provide methods comprising contacting a DNA molecule with any of the fusion proteins or complexes provided herein, and with at least one guide RNA, wherein the guide RNA is about 15-100 nucleotides long and comprises a sequence of at least 10 contiguous nucleotides that is complementary to a target sequence.

[0343] The domains of the base editor disclosed herein can be arranged in any order.

[0344] A defined target region can be a deamination window. A deamination window can be the defined region in which a base editor acts upon and deaminates a target nucleotide. In some embodiments, the deamination window is within a 2, 3, 4, 5, 6, 7, 8, 9, or 10 base regions. In some embodiments, the deamination window is 5, 6, 7, 8, 9, 10, 11, 12, 13, 14, 15, 16, 17, 18, 19, 20, 21, 22, 23, 24, or 25 bases upstream of the PAM.

[0345] The base editors of the present disclosure can comprise any domain, feature or amino acid sequence which facilitates the editing of a target polynucleotide sequence.

### Methods of Using Fusion Proteins or Complexes Comprising a Cytidine or Adenosine Deaminase and a Cas9 Domain

[0346] Some aspects of this disclosure provide methods of using the fusion proteins, or complexes provided herein. For example, some aspects of this disclosure provide methods comprising contacting a DNA molecule with any of the fusion proteins or complexes provided herein, and with at least one guide RNA described herein.

[0347] In some embodiments, a fusion protein or complex of the disclosure is used for editing a target gene of interest. In particular, a cytidine deaminase or adenosine deaminase nucleobase editor described herein is capable of making multiple mutations within a target sequence. These mutations may affect the function of the target. For example, when a cytidine deaminase or adenosine deaminase nucleobase editor is used to target a regulatory region the function of the regulatory region is altered and the expression of the downstream protein is reduced or eliminated.

### Base Editor Efficiency

[0348] In some embodiments, the purpose of the methods provided herein is to alter a gene and/or gene product via gene editing. The nucleobase editing proteins provided herein can be used for gene editing-based human therapeutics in vitro or in vivo. It will be understood by the skilled artisan that the nucleobase editing proteins provided herein, e.g., the fusion proteins or complexes comprising a polynucleotide programmable nucleotide binding domain (e.g., Cas9) and a nucleobase editing domain (e.g., an adenosine deaminase domain or a cytidine deaminase domain) can be used to edit a nucleotide from A to G or C to T.

[0349] Advantageously, base editing systems as provided herein provide genome editing without generating double-strand DNA breaks, without requiring a donor DNA template, and without inducing an excess of stochastic insertions and deletions as CRISPR may do. In some embodiments, the present disclosure provides base editors that efficiently generate an intended mutation, such as a STOP codon, in a nucleic acid (e.g., a nucleic acid within a genome of a subject) without generating a significant number of unintended mutations, such as unintended point mutations.

[0350] The base editors of the disclosure advantageously modify a specific nucleotide base encoding a protein without generating a significant proportion of indels (i.e., insertions or deletions). Such indels can lead to frame shift mutations within a coding region of a gene.

[0351] In some embodiments, the base editors provided herein are capable of generating a ratio of intended mutations to indels (i.e., intended point mutations:unintended point mutations) that is greater than 1:1. In some embodiments, the base editors provided herein are capable of generating a ratio of intended mutations to indels that is at least 1.5:1, at least 2:1, at least 2.5:1, at least 3:1, at least 3.5:1, at least 4:1, at least 4.5:1, at least 5:1, at least 5.5:1, at least 6:1, at least 6.5:1, at least 7:1, at least 7.5:1, at least 8:1, at least 10:1, at least 12:1, at least 15:1, at least 20:1, at least 25:1, at least 30:1, at least 40:1, at least 50:1, at least 100:1, at least 200:1, at least 300:1, at least 400:1, at least 500:1, at least 600:1, at least 700:1, at least 800:1, at least 900:1, or at least 1000:1, or more. The number of intended mutations and indels may be determined using any suitable method.

[0352] In some embodiments, the base editors provided herein can limit formation of indels in a region of a nucleic acid. In some embodiments, the region is at a nucleotide targeted by a base editor or a region within 2, 3, 4, 5, 6, 7, 8, 9, or 10 nucleotides of a nucleotide targeted by a base editor. In some embodiments, any of the base editors provided herein can limit the formation of indels at a region of a nucleic acid to less than 1%, less than 1.5%, less than 2%, less than 2.5%, less than 3%, less than 3.5%, less than 4%, less than 4.5%, less than 5%, less than 6%, less than 7%, less than 8%, less than 9%, less than 10%, less than 12%, less than 15%, or less than 20%.

[0353] Base editing is often referred to as a “modification”, such as, a genetic modification, a gene modification and modification of the nucleic acid sequence and is clearly understandable based on the context that the modification is a base editing modification. A base editing modification is therefore a modification at the nucleotide base level, for example as a result of the deaminase activity discussed throughout the disclosure, which then results in a change in the gene sequence and may affect the gene product.

[0354] In some embodiments, the modification, e.g., single base edit results in about or at least about a 10%, 15%, 20%, 25%, 30%, 35%, 40%, 45%, 50%, 55%, 60%, 65%, 70%, 75%, 80%, 85%, 90%, 95%, 99%, or 100% reduction, or reduction to an undetectable level, of the gene targeted expression.

[0355] The disclosure provides adenosine deaminase variants (e.g., ABE8 variants) that have increased efficiency and specificity. In particular, the adenosine deaminase variants described herein are more likely to edit a desired base within a polynucleotide and are less likely to edit bases that are not intended to be altered (e.g., “bystanders”).

[0356] In some embodiments, any of the base editing system comprising one of the ABE8 base editor variants described herein has reduced bystander editing or mutations by at least 1%, 2%, 3%, 4%, 5%, 10%, 15%, 20%, 25%, 30%, 35%, 40%, 45%, 50%, 55%, 60%, 65%, 70%, 75%, 80%, 85%, 90%, 95%, or 99% compared to a base editor system comprising an ABE7 base editor, e.g., ABE7.10.

[0357] In some embodiments, any of the ABE8 base editor variants described herein has higher base editing efficiency compared to the ABE7 base editors. In some embodiments, any of the ABE8 base editor variants described herein have at least 1%, 2%, 3%, 4%, 5%, 10%, 15%, 20%, 25%, 30%, 35%, 40%, 45%, 50%, 55%, 60%, 65%, 70%, 75%, 80%, 85%, 90%, 95%, 99%, 100%, 105%, 110%, 115%, 120%, 125%, 130%, 135%, 140%, 145%, 150%, 155%, 160%, 165%, 170%, 175%, 180%, 185%, 190%, 195%, 200%, 210%, 220%, 230%, 240%, 250%, 260%, 270%, 280%, 290%, 300%, 310%, 320%, 330%, 340%, 350%, 360%, 370%, 380%, 390%, 400%, 450%, or 500% higher base editing efficiency compared to an ABE7 base editor, e.g., ABE7.10.

[0358] The ABE8 base editor variants described herein may be delivered to a host cell via a plasmid, a vector, a LNP complex, or an mRNA. In some embodiments, any of the ABE8 base editor variants described herein is delivered to a host cell as an mRNA.

[0359] In some embodiments, the method described herein, for example, the base editing methods has minimum to no off-target effects. In some embodiments, the method described herein, for example, the base editing methods, has minimal to no chromosomal translocations.

[0360] In some embodiments, the base editing method described herein results in about 91%, 92%, 93%, 94%, 95%, 96%, 97%, 98%, 99% or 100% of a cell population that have been successfully edited.

[0361] In some embodiments, the percent of viable cells in a cell population following a base editing intervention is greater than at least 60%, 70%, 80%, or 90% of the starting cell population at the time of the base editing event. In some embodiments, the percent of viable cells in a cell population following editing is about 70%. In some embodiments, the percent of viable cells in a cell population following editing is about 75%. In some embodiments, the percent of viable cells in a cell population following editing is about 80%. In some embodiments, the percent of viable cells in a cell population as described above is about 85%. In some embodiments, the percent of viable cells in a cell population as described above is about 90%, or about 91%, 92%, 93%, 94% 95%, 96%, 97%, 98%, 99%, or 100% of the cells in the population at the time of the base editing event.

[0362] In embodiments, the cell population is a population of cells contacted with a base editor, complex, or base editor system of the present disclosure.

[0363] The number of intended mutations and indels can be determined using any suitable method, for example, as described in International PCT Application Nos. PCT/US2017/045381 (WO2018/027078) and PCT/US2016/058344 (WO2017/070632); Komor, A. C., et al., “Programmable editing of a target base in genomic DNA without double-stranded DNA cleavage” Nature 533, 420-424 (2016); Gaudelli, N. M., et al., “Programmable base editing of A·T to G·C in genomic DNA without DNA cleavage” Nature 551, 464-471 (2017); and Komor, A. C., et al., “Improved base excision repair inhibition and bacteriophage Mu Gam protein yields C:G-to-T:A base editors with higher efficiency and product purity” Science Advances 3:eaao4774 (2017); the entire contents of which are hereby incorporated by reference.

[0364] In some embodiments, to calculate indel frequencies, sequencing reads are scanned for exact matches to two 10-bp sequences that flank both sides of a window in which indels can occur. If no exact matches are located, the read is excluded from analysis. If the length of this indel window exactly matches the reference sequence the read is classified as not containing an indel. If the indel window is two or more bases longer or shorter than the reference sequence, then the sequencing read is classified as an insertion or deletion, respectively. In some embodiments, the base editors provided herein can limit formation of indels in a region of a nucleic acid. In some embodiments, the region is at a nucleotide targeted by a base editor or a region within 2, 3, 4, 5, 6, 7, 8, 9, or 10 nucleotides of a nucleotide targeted by a base editor.

### Multiplex Editing

[0365] In some embodiments, the base editor system provided herein is capable of multiplex editing of a plurality of nucleobase pairs in one or more genes or polynucleotide sequences. In some embodiments, the plurality of nucleobase pairs is located in the same gene or in one or more genes, wherein at least one gene is located in a different locus. In some embodiments, the multiplex editing comprises one or more guide polynucleotides. In some embodiments, the multiplex editing comprises one or more base editor systems. In some embodiments, the multiplex editing comprises one or more base editor systems with a single guide polynucleotide or a plurality of guide polynucleotides. In some embodiments, the multiplex editing comprises one or more guide polynucleotides with a single base editor system. It should be appreciated that the characteristics of the multiplex editing using any of the base editors as described herein can be applied to any combination of methods using any base editor provided herein. It should also be appreciated that the multiplex editing using any of the base editors as described herein can comprise a sequential editing of a plurality of nucleobase pairs.

[0366] In some embodiments, the base editor system capable of multiplex editing of a plurality of nucleobase pairs in one or more genes comprises one of ABE7, ABE8, and/or ABE9 base editors.

Reducing expression of Target Genes in Cells

[0367] In some embodiments, provided herein is a cell (e.g., cell from the liver, eye, and/or a central nervous system or component thereof) with at least one modification in an endogenous gene or one or more regulatory elements thereof. Provided herein are also methods, base editors, base editor systems, guide RNAs, and compositions for modifying the cell. In some embodiments, the cell may comprise a further modification in at least one, two, three, four, five, six, seven, eight, nine, ten, eleven, twelve, thirteen, fourteen, fifteen, sixteen, seventeen, eighteen, nineteen, twenty or more endogenous genes or regulatory elements thereof. In some embodiments, the at least one modification is a single nucleobase modification. In some embodiments, the at least one modification is generated by base editing. The base editing may be positioned at any suitable position of the gene, or in a regulatory element of the gene. Thus, it may be appreciated that a single base editing at a start codon, for example, can completely abolish the expression of the gene. In some embodiments, the base editing may be performed at a site within an exon. In some embodiments, the base editing may be performed at a site on more than one exons. In some embodiments, the base editing may be performed at any exon of the multiple exons in a gene. In some embodiments, base editing may introduce a premature STOP codon into an exon, resulting in either lack of a translated product or in a truncated that may be misfolded and thereby eliminated by degradation, or may produce an unstable mRNA that is readily degraded. In some embodiments, the cell is a hepatocyte, and/or a cell from the liver, eye, and/or a central nervous system or component thereof.

[0368] In some embodiments, the gene is a C3 polynucleotide.

[0369] In some embodiments, the editing of the endogenous gene reduces expression of the gene. In some embodiments, the editing of the endogenous gene reduces expression of the gene by at least 50% as compared to a control cell without the modification. In some embodiments, the editing of the endogenous gene reduces expression of the gene by at least 60% as compared to a control cell without the modification. In some embodiments, the editing of the endogenous gene reduces expression of the gene by at least 70% as compared to a control cell without the modification. In some embodiments, the editing of the endogenous gene reduces expression of the gene by at least 80% as compared to a control cell without the modification. In some embodiments, the editing of the endogenous gene reduces expression of the gene by at least 90% as compared to a control cell without the modification. In some embodiments, the editing of the endogenous gene reduces expression of the gene by at least 100% as compared to a control cell without the modification. In some embodiments, the editing of the endogenous gene eliminates gene expression.

[0370] In some embodiments, base editing may be performed on an intron. For example, base editing may be performed on an intron. In some embodiments, the base editing may be performed at a site within an intron. In some embodiments, the base editing may be performed at sites in one or more introns. In some embodiments, the base editing may be performed at any intron of the multiple introns in a gene. In some embodiments, one or more base edits may be performed on an exon, an intron, or any combination of exons and introns.

[0371] In some embodiments, the modification or base edit may be within a promoter site. In some embodiments, the base edit may be introduced within an alternative promoter site. In some embodiments, the base edit may be in a 5′ regulatory element, such as an enhancer. In some embodiment, base editing may be introduced to disrupt the binding site of a nucleic acid binding protein. Exemplary nucleic acid binding proteins may be a polymerase, nuclease, gyrase, topoisomerase, methylase or methyl transferase, transcription factors, enhancer, PABP, zinc finger proteins, among many others.

[0372] In some embodiments, base editing may be used for splice disruption to silence target protein expression. In some embodiments, base editing may generate a splice acceptor-splice donor (SA-SD) site. Targeted base editing generating a SA-SD, or at a SA-SD site can result in reduced expression of a gene. In some embodiments, base editors (e.g., ABE, CBE, or CABE) are used to target dinucleotide motifs that constitute splice acceptor and splice donor sites, which are the first and last two nucleotides of each intron. In some embodiments, splice disruption is achieved with an adenosine base editor (ABE). In some embodiments, splice disruption is achieved with a cytidine base editor (CBE). In some embodiments, base editors (e.g., ABE, CBE, or CABE) are used to edit exons by creating STOP codons.

[0373] In some embodiments, the modification generates a premature stop codon in the endogenous genes. In some embodiments, the STOP codon silences target protein expression. In some embodiments, the modification is a single base modification. In some embodiments, the modification is generated by base editing. The premature stop codon may be generated in an exon, an intron, or an untranslated region. In some embodiments, base editing may be used to introduce more than one STOP codon, in one or more alternative reading frames. In some embodiments, the stop codon is generated by a adenosine base editor (ABE). In some embodiments, the stop codon is generated by a cytidine base editor (CBE). In some embodiments, the CBE generates any one of the following edits (shown in underlined font) to generate a STOP codon: CAG→TAG; CAA→TAA; CGA→TGA; TGG→TGA; TGG→TAG; or TGG→TAA.

[0374] In some embodiments, modification/base edits may be introduced at a 3′-UTR, for example, in a poly adenylation (poly-A) site. In some embodiments, base editing may be performed on a 5′-UTR region.

### Delivery Systems

### Nucleic Acid-Based Delivery of Base Editor Systems

[0375] Nucleic acid molecules encoding a base editor system according to the present disclosure can be administered to subjects or delivered into cells in vitro or in vivo by art-known methods or as described herein. For example, a base editor system comprising a deaminase (e.g., cytidine or adenine deaminase) can be delivered by vectors (e.g., viral or non-viral vectors), or by naked DNA, DNA complexes, lipid nanoparticles, or a combination of the aforementioned compositions. A base editor system may be delivered to a cell using any methods available in the art including, but not limited to, physical methods (e.g., electroporation, particle gun, calcium phosphate transfection), viral methods, non-viral methods (e.g., liposomes, cationic methods, lipid nanoparticles, polymeric nanoparticles), or biological non-viral methods (e.g., attenuated bacterial, engineered bacteriophages, mammalian virus-like particles, biological liposomes, erythrocyte ghosts, exosomes).

[0376] Nanoparticles, which can be organic or inorganic, are useful for delivering a base editor system or component thereof. Nanoparticles are well known in the art and any suitable nanoparticle can be used to deliver a base editor system or component thereof, or a nucleic acid molecule encoding such components. In one example, organic (e.g., lipid and/or polymer) nanoparticles are suitable for use as delivery vehicles in certain embodiments of this disclosure. Non-limiting examples of lipid nanoparticles suitable for use in the methods of the present disclosure include those described in International Patent Application Publications No. WO2022140239, WO2022140252, WO2022140238, WO2022159421, WO2022159472, WO2022159475, WO2022159463, WO2021113365, and WO2021141969, the disclosures of each of which is incorporated herein by reference in its entirety for all purposes.

### Viral Vectors

[0377] A base editor described herein can be delivered with a viral vector. In some embodiments, a base editor disclosed herein can be encoded on a nucleic acid that is contained in a viral vector. In some embodiments, one or more components of the base editor system can be encoded on one or more viral vectors.

[0378] Viral vectors can include lentivirus (e.g., HIV and FIV-based vectors), Adenovirus (e.g., AD100), Retrovirus (e.g., Maloney murine leukemia virus, MML-V), herpesvirus vectors (e.g., HSV-2), and Adeno-associated viruses (AAVs), or other plasmid or viral vector types, in particular, using formulations and doses from, for example, U.S. Pat. No. 8,454,972 (formulations, doses for adenovirus), U.S. Pat. No. 8,404,658 (formulations, doses for AAV) and U.S. Pat. No. 5,846,946 (formulations, doses for DNA plasmids) and from clinical trials and publications regarding the clinical trials involving lentivirus, AAV and adenovirus. For example, for AAV, the route of administration, formulation and dose can be as in U.S. Pat. No. 8,454,972 and as in clinical trials involving AAV. For Adenovirus, the route of administration, formulation and dose can be as in U.S. Pat. No. 8,404,658 and as in clinical trials involving adenovirus. For plasmid delivery, the route of administration, formulation and dose can be as in U.S. Pat. No. 5,846,946 and as in clinical studies involving plasmids. Doses can be based on or extrapolated to an average 70 kg individual (e.g., a male adult human), and can be adjusted for patients, subjects, mammals of different weight and species. Frequency of administration is within the ambit of the medical or veterinary practitioner (e.g., physician, veterinarian), depending on usual factors including the age, sex, general health, other conditions of the patient or subject and the particular condition or symptoms being addressed. The viral vectors can be injected into the tissue of interest. For cell-type specific base editing, the expression of the base editor and optional guide nucleic acid can be driven by a cell-type specific promoter.

[0379] Viral vectors can be selected based on the application. For example, for in vivo gene delivery, AAV can be advantageous over other viral vectors. In some embodiments, AAV allows low toxicity, which can be due to the purification method not requiring ultra-centrifugation of cell particles that can activate the immune response. In some embodiments, AAV allows low probability of causing insertional mutagenesis because it doesn't integrate into the host genome. Adenoviruses are commonly used as vaccines because of the strong immunogenic response they induce. Packaging capacity of the viral vectors can limit the size of the base editor that can be packaged into the vector.

[0380] AAV has a packaging capacity of about 4.5 Kb or 4.75 Kb including two 145 base inverted terminal repeats (ITRs). This means disclosed base editor as well as a promoter and transcription terminator can fit into a single viral vector. Constructs larger than 4.5 or 4.75 Kb can lead to significantly reduced virus production. For example, SpCas9 is quite large, the gene itself is over 4.1 Kb, which makes it difficult for packing into AAV. Therefore, embodiments of the present disclosure include utilizing a disclosed base editor which is shorter in length than conventional base editors. In some examples, the base editors are less than 4 kb. Disclosed base editors can be less than 4.5 kb, 4.4 kb, 4.3 kb, 4.2 kb, 4.1 kb, 4 kb, 3.9 kb, 3.8 kb, 3.7 kb, 3.6 kb, 3.5 kb, 3.4 kb, 3.3 kb, 3.2 kb, 3.1 kb, 3 kb, 2.9 kb, 2.8 kb, 2.7 kb, 2.6 kb, 2.5 kb, 2 kb, or 1.5 kb. In some embodiments, the disclosed base editors are 4.5 kb or less in length.

[0381] An AAV can be AAV1, AAV2, AAV5, AAV6 or any combination thereof. One can select the type of AAV with regard to the cells to be targeted; e.g., one can select AAV serotypes 1, 2, 5 or a hybrid capsid AAV1, AAV2, AAV5 or any combination thereof for targeting brain or neuronal cells; and one can select AAV4 for targeting cardiac tissue. AAV8 is useful for delivery to the liver. A tabulation of certain AAV serotypes as to these cells can be found in Grimm, D. et al, J. Virol. 82: 5887-5911 (2008)).

[0382] In some embodiments, lentiviral vectors are used to transduce a cell of interest with a polynucleotide encoding a base editor or base editor system as provided herein. Lentiviruses are complex retroviruses that have the ability to infect and express their genes in both mitotic and post-mitotic cells. The most commonly known lentivirus is the human immunodeficiency virus (HIV), which uses the envelope glycoproteins of other viruses to target a broad range of cell types.

[0383] In another embodiment, minimal non-primate lentiviral vectors based on the equine infectious anemia virus (EIAV) are also contemplated. In another embodiment, RetinoStat®, an equine infectious anemia virus-based lentiviral gene therapy vector that expresses angiostatic proteins endostatin and angiostatin that is contemplated to be delivered via a subretinal injection. In another embodiment, use of self-inactivating lentiviral vectors are contemplated.

[0384] Any RNA of the systems, for example a guide RNA or a base editor-encoding mRNA, can be delivered in the form of RNA. Base editor-encoding mRNA can be generated using in vitro transcription. For example, nuclease mRNA can be synthesized using a PCR cassette containing the following elements: T7 promoter, optional kozak sequence (GCCACC), nuclease sequence, and 3′ UTR such as a 3′ UTR from beta globin-polyA tail. The cassette can be used for transcription by T7 polymerase. Guide polynucleotides (e.g., gRNA) can also be transcribed using in vitro transcription from a cassette containing a T7 promoter, followed by the sequence “GG”, and guide polynucleotide sequence.

### Non-Viral Platforms for Gene Transfer

[0385] Non-viral platforms for introducing a heterologous polynucleotide into a cell of interest are known in the art.

[0386] For example, the disclosure provides a method of inserting a heterologous polynucleotide into the genome of a cell using a Cas9 or Cas12 (e.g., Cas12b) ribonucleoprotein complex (RNP)-DNA template complex where an RNP including a Cas9 or Cas12 nuclease domain and a guide RNA, wherein the guide RNA specifically hybridizes to a target region of the genome of the cell, and wherein the Cas nuclease domain cleaves the target region to create an insertion site in the genome of the cell. A DNA template is then used to introduce a heterologous polynucleotide. In embodiments, the DNA template is a double-stranded or single-stranded DNA template, wherein the size of the DNA template is about 200 nucleotides or is greater than about 200 nucleotides, wherein the 5′ and 3′ ends of the DNA template comprise nucleotide sequences that are homologous to genomic sequences flanking the insertion site. In some embodiments, the DNA template is a single-stranded circular DNA template. In embodiments, the molar ratio of RNP to DNA template in the complex is from about 3:1 to about 100:1.

[0387] In some embodiments, the DNA template is a linear DNA template. In some examples, the DNA template is a single-stranded DNA template. In certain embodiments, the single-stranded DNA template is a pure single-stranded DNA template. In some embodiments, the single stranded DNA template is a single-stranded oligodeoxynucleotide (ssODN).

[0388] In other embodiments, a single-stranded DNA (ssDNA) can produce efficient HDR with minimal off-target integration. In one embodiment, an ssDNA phage is used to efficiently and inexpensively produce long circular ssDNA (cssDNA) donors. These cssDNA donors serve as efficient HDR templates when used with Cas9 or Cas12 (e.g., Cas12a, Cas12b), with integration frequencies superior to linear ssDNA (QssDNA) donors.

### Inteins

[0389] Inteins (intervening protein) are auto-processing domains found in a variety of diverse organisms, which carry out a process known as protein splicing.

[0390] Non-limiting examples of inteins include any intein or intein-pair known in the art, which include a synthetic intein based on the dnaE intein, the Cfa-N (e.g., split intein-N) and Cfa-C (e.g., split intein-C) intein pair, has been described (e.g., in Stevens et al., J Am Chem Soc. 2016 Feb. 24; 138(7):2162-5, incorporated herein by reference), and DnaE. Non-limiting examples of pairs of inteins that may be used in accordance with the present disclosure include: Cfa DnaE intein, Ssp GyrB intein, Ssp DnaX intein, Ter DnaE3 intein, Ter ThyX intein, Rma DnaB intein and Cne Prp8 intein (e.g., as described in U.S. Pat. No. 8,394,604, incorporated herein by reference). Exemplary nucleotide and amino acid sequences of inteins are provided in the Sequence Listing at SEQ ID NOs: 370-377 and 389-424. Inteins suitable for use in embodiments of the present disclosure and methods for use thereof are described in U.S. Pat. No. 10,526,401, International Patent Application Publication No. WO 2013/045632, and in U.S. Patent Application Publication No. US 2020/0055900, the full disclosures of which are incorporated herein by reference in their entireties by reference for all purposes.

[0391] Intein-N and intein-C may be fused to the N-terminal portion of a split Cas9 and the C-terminal portion of the split Cas9, respectively, for the joining of the N-terminal portion of the split Cas9 and the C-terminal portion of the split Cas9. For example, in some embodiments, an intein-N is fused to the C-terminus of the N-terminal portion of the split Cas9, i.e., to form a structure of N—[N-terminal portion of the split Cas9]-[intein-N]—C. In some embodiments, an intein-C is fused to the N-terminus of the C-terminal portion of the split Cas9, i.e., to form a structure of N-[intein-C]—[C-terminal portion of the split Cas9]-C. In embodiments, a base editor is encoded by two polynucleotides, where one polynucleotide encodes a fragment of the base editor fused to an intein-N and another polynucleotide encodes a fragment of the base editor fused to an intein-C. Methods for designing and using inteins are known in the art and described, for example by WO2014004336, WO2017132580, WO2013045632A1, US20150344549, and US20180127780, each of which is incorporated herein by reference in their entirety.

[0392] In some embodiments, an ABE was split into N- and C-terminal fragments at Ala, Ser, Thr, or Cys residues within selected regions of SpCas9. These regions correspond to loop regions identified by Cas9 crystal structure analysis.

[0393] The N-terminus of each fragment is fused to an intein-N and the C-terminus of each fragment is fused to an intein C at amino acid positions S303, T310, T313, S355, A456, S460, A463, T466, S469, T472, T474, C574, S577, A589, and S590, referenced to SEQ ID NO: 197.

### Pharmaceutical Compositions

[0394] In some aspects, the present disclosure provides a pharmaceutical composition comprising any of the cells, polynucleotides, vectors, base editors, base editor systems, guide polynucleotides, fusion proteins, complexes, or the fusion protein-guide polynucleotide complexes described herein.

[0395] The pharmaceutical compositions of the present disclosure can be prepared in accordance with known techniques. See, e.g., Remington, The Science And Practice of Pharmacy (21st ed. 2005). In general, the cell, or population thereof is admixed with a suitable carrier prior to administration or storage, and in some embodiments, the pharmaceutical composition further comprises a pharmaceutically acceptable carrier. Suitable pharmaceutically acceptable carriers generally comprise inert substances that aid in administering the pharmaceutical composition to a subject, aid in processing the pharmaceutical compositions into deliverable preparations, or aid in storing the pharmaceutical composition prior to administration. Pharmaceutically acceptable carriers can include agents that can stabilize, optimize or otherwise alter the form, consistency, viscosity, pH, pharmacokinetics, solubility of the formulation. Such agents include buffering agents, wetting agents, emulsifying agents, diluents, encapsulating agents, and skin penetration enhancers. For example, carriers can include, but are not limited to, saline, buffered saline, dextrose, arginine, sucrose, water, glycerol, ethanol, sorbitol, dextran, sodium carboxymethyl cellulose, and combinations thereof.

[0396] In some embodiments, the pharmaceutical composition is formulated for delivery to a subject. Suitable routes of administrating the pharmaceutical composition described herein include, without limitation: topical, subcutaneous, transdermal, intradermal, intralesional, intraarticular, intraperitoneal, intravesical, transmucosal, gingival, intradental, intracochlear, transtympanic, intraorgan, epidural, intrathecal, intramuscular, intravenous, intravascular, intraosseus, periocular, intratumoral, intracerebral, and intracerebroventricular administration.

[0397] In some embodiments, the pharmaceutical composition described herein is administered locally to a diseased site (e.g., a liver, an eye, or the central nervous system). In some embodiments, the pharmaceutical composition described herein is administered to a subject by injection, by means of a catheter, by means of a suppository, or by means of an implant, the implant being of a porous, non-porous, or gelatinous material, including a membrane, such as a sialastic membrane, or a fiber.

[0398] In some embodiments, any of the fusion proteins, gRNAs, and/or complexes described herein are provided as part of a pharmaceutical composition. In some embodiments, the pharmaceutical composition comprises any of the fusion proteins or complexes provided herein. In some embodiments pharmaceutical composition comprises a gRNA, a nucleic acid programmable DNA binding protein, a cationic lipid, and a pharmaceutically acceptable excipient. In embodiments, pharmaceutical compositions comprise a lipid nanoparticle and a pharmaceutically acceptable excipient. In embodiments, the lipid nanoparticle contains a gRNA, a base editor, a complex, a base editor system, or a component thereof of the present disclosure, and/or one or more polynucleotides encoding the same. Pharmaceutical compositions can optionally comprise one or more additional therapeutically active substances.

[0399] The compositions, as described above, can be administered in effective amounts. The effective amount will depend upon the mode of administration, the particular condition being treated, and the desired outcome. It may also depend upon the stage of the condition, the age and physical condition of the subject, the nature of concurrent therapy, if any, and like factors well-known to the medical practitioner. For therapeutic applications, it is that amount sufficient to achieve a medically desirable result.

[0400] In some embodiments, compositions in accordance with the present disclosure can be used for treatment of any of a variety of diseases, disorders, and/or conditions.

### Methods of Treatment

[0401] Some aspects of the present disclosure provide methods of treating a subject in need, the method comprising administering to a subject in need an effective therapeutic amount of a pharmaceutical composition as described herein. In other embodiments, the methods of the disclosure comprise expressing or introducing into a cell a base editor polypeptide and one or more guide RNAs capable of targeting a nucleic acid molecule encoding at least one polypeptide.

[0402] One of ordinary skill in the art would recognize that multiple administrations of the pharmaceutical compositions contemplated in particular embodiments may be required to affect the desired therapy. For example, a composition may be administered to the subject 1, 2, 3, 4, 5, 6, 7, 8, 9, or 10 or more times over a span of 1 week, 2 weeks, 3 weeks, 1 month, 2 months, 3 months, 4 months, 5 months, 6 months, 1 year, 2 years, 5, years, 10 years, or more.

[0403] Administration of the pharmaceutical compositions contemplated herein may be carried out using conventional techniques including, but not limited to, infusion, transfusion, or parenterally. In some embodiments, parenteral administration includes infusing or injecting intravascularly, intravenously, intramuscularly, intraarterially, intrathecally, intratumorally, intradermally, intraperitoneally, transtracheally, subcutaneously, subcuticularly, intraarticularly, subcapsularly, subarachnoidly and intrasternally.

[0404] In various embodiments, the methods of the disclosure are associated with a reduction in complement activation in a subject. In some cases, the methods are associated with a reduction in inflammation in a subject.

### Combination Therapy

[0405] In various embodiments, methods of the present disclosure involve administering an inhibitor of complement component C3. In embodiments, a pharmaceutical composition of the disclosure contains an inhibitor of complement component C3. In some embodiments, the complement inhibitor is compstatin or a compstatin analog or mimetic.

[0406] Compstatin is a cyclic peptide that binds to C3 and inhibits complement activation. U.S. Pat. No. 6,319,897 describes a peptide having the sequence I[CVVQDWGHHRC]T (SEQ ID NO: 853), with the disulfide bond between the two cysteines denoted by brackets. Morikis, et al., Protein Sci., 7(3):619-27, 1998) also describe a compstatin. In some instances, compstatin is amidated at the C-terminus. Compstatin analogs, mimetics, derivatives thereof, and/or compositions containing the same suitable for use in the methods and compositions of the present disclosure include those described in WO2021007111 (PCT/US2020/040741); WO2021011927 (PCT/US2020/042676); WO2004026328 (PCT/US2003/029653); Morikis, D., et al., Biochem Soc Trans. 32(Pt 1):28-32, 2004, Mallik, B., et al., J. Med. Chem., 274-286, 2005; Katragadda, M., et al. J. Med. Chem., 49: 4616-4622, 2006; WO2007062249 (PCT/US2006/045539); WO2007044668 (PCT/US2006/039397); WO2009046198 (PCT/US2008/078593); WO2010127336 (PCT/US2010/033345); WO2012155107; WO 2014078731; WO2019166411; WO2009121065; WO2021163654; WO2021142171; WO2017062879; WO2014152391; WO2014028861; WO2018187813; WO2019089653; WO2016049385; WO2018075373; WO2019118938; WO2022061304; WO2012006599; WO2011163394; WO2012178083; U.S. Pat. No. 9,291,622; U.S. Ser. No. 10/407,466; U.S. Pat. No. 8,580,735; and Hillmen, et al. “Pegcetacoplan versus Eculizumab in Paroxysmal Nocturnal Hemoglobinuria,” N Engl J Med. 2021 Mar. 18; 384(11):1028-1037; the disclosures of all of which are incorporated herein by reference in their entireties for all purposes. In certain embodiments, a compstatin analog is pegcetacoplan (“APL-2”), having the structure of the compound of FIG. 19 with n of about 800 to about 1100 and/or a PEG having an average molecular weight of about 40 kD. Pegcetacoplan is also referred to as Poly(oxy-1,2-ethanediyl), α-hydro-ω-hydroxy-, 15,15′-diester with N-acetyl-L-isoleucyl-L-cysteinyl-L-valyl-1-methyl-L-tryptophyl-L-glutaminyl-L-α-aspartyl-L-tryptophylglycyl-L-alanyl-L-histidyl-L-arginyl-L-cysteinyl-L-threonyl-2-[2-(2-aminoethoxy)ethoxy]acetyl-N⁶-carboxy-L-lysinamide cyclic (2-->12)-(disulfide); or O,O′-bis[(S²,S¹²-cyclo{N-acetyl-L-isoleucyl-L-cysteinyl-L-valyl-1-methyl-L-tryptophyl-L-glutaminyl-L-α-aspartyl-L-tryptophylglycyl-L-alanyl-L-histidyl-L-arginyl-L-cysteinyl-L-threonyl-2-[2-(2-aminoethoxy)ethoxy]acetyl-L-lysinamide})-N^{6.15}-carbonyl]polyethylene glycol (n=800-1100).

[0407] In some embodiments, a complement inhibitor is an antibody, e.g., an anti-C3 antibody, or a fragment thereof. In some embodiments, an antibody fragment may be used to inhibit C3 activation. The antibody fragment may be Fab′, Fab′(2), Fv, or a single chain Fv. In some embodiments, the anti-C3 antibody is monoclonal. In some embodiments, the anti-antibody is polyclonal. In some embodiments, the anti-C3 antibody is de-immunized. In some embodiments the anti-C3 antibody is a fully human monoclonal antibody.

[0408] In some instances, a complement inhibitor is an inhibitory polynucleotide (e.g., an siRNA), such as those described in WO2021163654, the disclosure of which is incorporated herein in its entirety for all purposes.

[0409] In some embodiments, a complement inhibitor is a polypeptide inhibitor and/or a nucleic acid aptamer (see, e.g., U.S. Publ. No. 20030191084). Exemplary polypeptide inhibitors include an enzyme that degrades C3 or C3b (see, e.g., U.S. Pat. No. 6,676,943).

### Kits

[0410] The disclosure provides kits for use in treating a subject to reduce complement activation. In some embodiments, the kit further includes a base editor system or a polynucleotide encoding a base editor system, wherein the base editor polypeptide system a nucleic acid programmable DNA binding protein (napDNAbp), a deaminase, and a guide RNA. In some embodiments, the napDNAbp is Cas9 or Cas12. In some embodiments, the polynucleotide encoding the base editor is a mRNA sequence. In some embodiments, the deaminase is a cytidine deaminase or an adenosine deaminase. In some embodiments, the kit comprises a guide RNA and/or base editor system and instructions regarding the use of the guide RNA and/or base editor system.

[0411] The kits may further comprise written instructions for using a base editor and/or base editor system as described herein. In other embodiments, the instructions include at least one of the following: precautions; warnings; clinical studies; and/or references. The instructions may be printed directly on the container (when present), or as a label applied to the container, or as a separate sheet, pamphlet, card, or folder supplied in or with the container. In a further embodiment, a kit comprises instructions in the form of a label or separate insert (package insert) for suitable operational parameters. In yet another embodiment, the kit comprises one or more containers with appropriate positive and negative controls or control samples, to be used as standard(s) for detection, calibration, or normalization. The kit can further comprise a second container comprising a pharmaceutically-acceptable buffer, such as (sterile) phosphate-buffered saline, Ringer's solution, or dextrose solution. It can further include other materials desirable from a commercial and user standpoint, including other buffers, diluents, filters, needles, syringes, and package inserts with instructions for use.

[0412] The practice of embodiments of the present disclosure employs, unless otherwise indicated, conventional techniques of molecular biology (including recombinant techniques), microbiology, cell biology, biochemistry and immunology, which are well within the purview of the skilled artisan. Such techniques are explained fully in the literature, such as, “Molecular Cloning: A Laboratory Manual”, second edition (Sambrook, 1989); “Oligonucleotide Synthesis” (Gait, 1984); “Animal Cell Culture” (Freshney, 1987); “Methods in Enzymology” “Handbook of Experimental Immunology” (Weir, 1996); “Gene Transfer Vectors for Mammalian Cells” (Miller and Calos, 1987); “Current Protocols in Molecular Biology” (Ausubel, 1987); “PCR: The Polymerase Chain Reaction”, (Mullis, 1994); “Current Protocols in Immunology” (Coligan, 1991). These techniques are applicable to the production of the polynucleotides and polypeptides of the disclosure, and, as such, may be considered in making and practicing embodiments of the disclosure. Particularly useful techniques for particular embodiments will be discussed in the sections that follow.

[0413] The following examples are put forth so as to provide those of ordinary skill in the art with a complete disclosure and description of how to make and use the assay, screening, and therapeutic methods of the disclosure, and are not intended to limit the scope of what the inventors regard as their invention.

### EXAMPLES

### Example 1: Complement Component 3 (C3) Knock-Out (KO) Guide Screening in Hek293T Cells

[0414] Experiments were undertaken to identify guide RNA sequences suitable for use in knocking-out expression of complement component 3 (C3) in cells. 162 guides, listed in Table 1A, were designed to knock down C3 protein expression (listed in Table 1A). These guides used either an ABE deaminase for splice site disruption or a CBE deaminase for stop codon generation or splice site disruption. 26 guides were screened with both an ABE and CBE deaminase for splice site disruption. All 188 (i.e., 162+26) guide-editor combinations were screened for use in editing the C3 gene. Editor mRNA+sgRNA were transfected in triplicate in Hek293T cells at an 800 ng (200 ng guide+600 ng editor mRNA) does of total RNA for all samples. In addition to the guide-editor pairs (i.e., base editor systems) of interest, a positive control guide-editor pair, ABE8.8_sgRNA_088, which contained the spacer sequence CAGGAUCCGCACAGACUCCA (SEQ ID NO: 792) and is known to be effective at editing sites outside of the C3 gene, was also tested. An untreated condition was included as a negative control. Genomic DNA was harvested from cells 3-days post-transfection.

[0415] A wide range of editing rates were observed for the 188 guide-editor combinations screened, with a subset of guides exhibiting favorable editing efficiencies at the targeted site (FIGS. 1 and 2). These included 29 guides that were screened with an ABE8.8 deaminase and achieved editing rates ≥40% (FIG. 1), and 26 guides that were screened with a BE4 deaminase and achieved editing rates >50% (FIG. 2).

### Example 2: Complement Component 3 (C3) Knock-Out (KO) Guide Screening and Functional Knockdown Assessment in Hepatocytes Extracted from Humanized Mouse Livers (PXB-Cells)

[0416] 22 guide+editor combinations that achieved favorable editing in Hek293T cells were selected for screening in human primary hepatocytes to assess editing efficiency and the capacity for functional knockdown of C3 protein expression. Editor mRNA+sgRNA were transfected in human hepatocytes extracted from humanized mouse livers (PXB-cells, PhoenixBio) following a 3-day cell incubation. In addition to the 22 guide-editor pairs of interest, the positive control base editor system sgRNA_088_ABE8.8_SpCas9 was also transfected. An untreated condition was included as a negative control. All conditions were performed in triplicate. To assess functional C3 knockdown, cell supernatants were collected and stored at −80° C. Such collections were performed 2-days prior to transfection (3-day incubation), as well as 4-, 7-, 10-, 13-, and 16-days post-transfection. An additional media change was performed 1-day post-transfection, but the supernatant was discarded. Genomic DNA was harvested from cells 16 days post-transfection and editing efficiency was assessed by Next Generation Sequencing (NGS). A human C3 ELISA assay was used to assess C3 protein concentration in cell supernatants pre-transfection, as well as 7-days, 13-days, and 16-days post-transfection.

[0417] Pre-transfection, no significant difference in C3 protein concentration was observed between samples (FIG. 3). 7-days post-transfection, a significant increase in C3 levels were observed for all conditions, but still no significant differences were observed between samples (FIG. 4). By 13-days post-transfection, roughly 50% reductions in C3 levels were observed for gRNA676_ABE8.8_SpCas9 and gRNA696_ABE8.8_SpCas9 as compared to sgRNA_088_ABE8.8_SpCas9, which did not edit within the C3 gene (FIG. 5). Similar trends were observed 16-days post-transfection (FIG. 6). C3 protein knockdown was positively correlated with editing rates across samples (FIGS. 5 and 6).

### Example 3: ABE Deaminase Optimization

[0418] ABE8.8 was used in Examples 1 and 2 to screen complement component 3 (C3) knock-out (KO) guides in Hek293T cells and in PXB cells. Other 8^{th} generation ABE deaminase variants include ABE8.13, ABE8.17, and ABE8.20. It was also found that there is a potential editing benefit when a V82T mutation is incorporated into ABE8.20 (ABE9.51). To optimize editing performance for C3 knock-out (KO) guides, CD KO guides that exhibited potential C3 protein knockdown in PXB-cells (i.e., gRNA676, gRNA696, gRNA701, gRNA662, gRNA661, gRNA695, and gRNA715) were screened with the five 8^{th} generation ABE editor variants (i.e., ABE8.8, ABE8.13, ABE8.17, ABE8.20, and ABE8.20_V82T (ABE9.51)) in Hek293T cells. 400 ng (100 ng guide+300 ng editor mRNA) doses of total RNA were transfected in triplicate for all samples. sgRNA_088_ABE8.8_SpCas9 was transfected as a positive control, and an untreated condition was also included as a negative control.

[0419] ABE8.8 performed as well or better in editing efficiency than the other ABE8 variants tested for gRNA676, gRNA696, gRNA701, gRNA662, gRNA661, and gRNA695. For gRNA715, ABE8.13 achieved the highest editing efficiency (FIG. 7).

### Example 4: Spacer Length Optimization for Complement Component 3 (C3) Knock-Out (KO) Guides

[0420] To further optimize editing performance for C3 KO guides, varying spacer lengths (19, 20, 21, 22, and 23 bp) were screened for guides that exhibited potential C3 protein knockdown (see Table 1C). 400 ng (100 ng guide+300 ng editor mRNA) doses of total RNA were transfected in triplicate for all samples. sgRNA_088_ABE8.8_SpCas9 was transfected as a positive control. An untreated condition was also included as a negative control. The standard 20 bp spacer performed as well or better in editing efficiency relative to the other spacer lengths tested for gRNA676, gRNA696, gRNA701, gRNA662, gRNA661, and gRNA695. For gRNA715, a 21 bp protospacer achieved the highest editing efficiency (FIG. 8).

### Example 5: Repeat Editing and Functional Knockdown Assessment for Complement Component 3 (C3) Guides in PXB-Cells

[0421] Transfection of PXB-cells was repeated with guides that exhibited potential C3 knockdown: gRNA676_ABE8.8_SpCas9, gRNA696_ABE8.8_SpCas9, gRNA701_ABE8.8_SpCas9, gRNA662_ABE8.8_SpCas9, gRNA661_ABE8.8_SpCas9, gRNA695_ABE8.8_SpCas9, and gRNA715_ABE8.13_SpCas9-VRQR (FIGS. 5 and 6). Editor mRNA+sgRNA (i.e., base editor systems) were transfected in triplicate in PXB-cells following a 3-day cell incubation. In addition to the 7 guide-editor pairs of interest, two positive control guide-editor pairs were also transfected. These included sgRNA_088_ABE8.8_SpCas9, which yields high editing efficiency at sites outside of the C3 gene, and gRNA1688_SpCas9, which has the spacer sequence CAACAAGUUCGUGACCGUGC (SEQ ID NO: 793) and induces functional C3 knockdown. 800 ng (200 ng guide+600 ng editor mRNA) and 1200 ng (300 ng guide+900 ng editor mRNA) doses were transfected for most samples. Only an 800 ng dose was tested for gRNA1688_SpCas9, gRNA715_ABE8.13_SpCas9-VRQR, and gRNA695_ABE8.8_SpCas9. An untreated condition was also included as a negative control. All conditions were performed in triplicate. To assess functional C3 knockdown, cell supernatants were collected and stored at −80° C. Such collection was performed just prior to transfection (3-day incubation), as well as 4-, 7-, 10-, 13-days post-transfection. An additional media change was performed 1-day post-transfection, but the supernatant was discarded. Genomic DNA was harvested from cells 13 days post-transfection and editing efficiency was assessed by Next Generation Sequencing (NGS). A human C3 ELISA assay was used to assess C3 protein concentration in cell supernatants pre-transfection and 13-days post-transfection.

[0422] Pre-transfection, no significant difference in C3 concentration was observed between samples (FIG. 9). By 13-days post-transfection, >55% reductions in C3 levels were observed for gRNA676_ABE8.8_SpCas9 and gRNA696_ABE8.8_SpCas9 as compared to sgRNA_088_ABE8.8_SpCas9 at both 800 ng and 1200 ng doses (FIG. 10). Editing efficiencies were high for most guides at >60% (FIG. 10).

### Example 6: Complement Component 3 (C3) Knock-Out (KO) Guide Screening and Functional Knockdown Assessment in Primary Human Hepatocyte (PHH) Co-Cultures

[0423] Editor mRNA+sgRNA (i.e., base editor systems) were transfected in triplicate in primary human hepatocyte (PHH) co-cultures following a 3-day cell incubation. Guides (sgRNAs) were used that exhibited potential C3 knockdown in the initial PXB-cell experiment (see a above): gRNA676_ABE8.8_SpCas9, gRNA696_ABE8.8_SpCas9, gRNA701_ABE8.8_SpCas9, gRNA662_ABE8.8_SpCas9, gRNA661_ABE8.8_SpCas9, and gRNA715_ABE8.13_SpCas9-VRQR. In addition to the 6 guide-editor pairs (i.e., base editor systems) of interest, two positive control guide-editor pairs were also transfected. These included sgRNA_088_ABE8.8_SpCas9, which yields high editing efficiency at sites outside of the C3 gene, and gRNA1688_SpCas9, which contains the spacer sequence CAACAAGTTCGTGACCGTGC (SEQ ID NO: 793) and induces functional C3 knockdown using a nuclease-based strategy. Separate 800 ng (200 ng guide+600 ng editor mRNA) and 1200 ng (300 ng guide+900 ng editor mRNA) doses were transfected for most samples, but only an 800 ng dose was tested for gRNA1688_SpCas9 and gRNA715_ABE8.13_SpCas9-VRQR. An untreated condition was also included as a negative control. All conditions were performed in duplicate or triplicate. To assess functional C3 protein knockdown, cell supernatants were collected and stored at −80° C. Such collections were performed just prior to transfection (3-day incubation), as well as 4-, 7-, 10-, 13-days post-transfection. An additional media change was performed 1-day post-transfection, but the supernatant was discarded. Genomic DNA was harvested from cells 13 days post-transfection and editing efficiency was assessed by Next Generation Sequencing (NGS). A human C3 ELISA assay was used to assess C3 protein concentration in cell supernatants pre-transfection and 13-days post-transfection.

[0424] Pre-transfection, no significant difference in C3 protein concentration was observed between samples (FIG. 11). By 13-days post-transfection, >55% reductions in C3 protein levels were observed for gRNA676_ABE8.8_SpCas9 and gRNA696_ABE8.8_SpCas9 as compared to sgRNA_088_ABE8.8_SpCas9 at both 800 ng and 1200 ng doses (FIG. 12). Editing efficiencies were high for most guides at >60% for most conditions (FIG. 12).

### Example 7: Assessing Editing Performance for Complement Component 3 (C3) Knock-Out (KO) Guides in Primary Cyno Hepatocyte (PCH) Monolayers

[0425] Editor mRNA+sgRNA were transfected in triplicate in primary cyno (Macaca fascicularis) hepatocyte (PCH) monolayers for guides that exhibited potential C3 knockdown in the initial PXB-cell experiment (see above): gRNA676_ABE8.8_SpCas9, gRNA696_ABE8.8_SpCas9, gRNA701_ABE8.8_SpCas9, gRNA662_ABE8.8_SpCas9, gRNA661_ABE8.8_SpCas9, and gRNA715_ABE8.13_SpCas9-VRQR. For gRNA676 and gRNA696, surrogate cyno guides were transfected, which were gRNA1793 and gRNA1798, respectively (see Table 1B for surrogate spacer sequences). In addition to the 6 guide-editor pairs (i.e., base editor systems) of interest, sgRNA_088_ABE8.8_SpCas9, was also transfected, and an untreated condition was also included as a negative control. All conditions were performed in triplicate. Genomic DNA was harvested from cells 3 days post-transfection and editing efficiency was assessed by Next Generation Sequencing (NGS).

[0426] Editing efficiencies for all guides were >35% (FIG. 13). These editing rates were comparable to the positive control sgRNA_088_ABE8.8_SpCas9.

### Example 8: Assessing Editing and Protein Knockdown (KD) for Complement Component 3 (C3) Knock-Out Guides in Primary Cyno Hepatocyte (PCH) Co-Cultures

[0427] The base editor systems gRNA1793_ABE8.8_SpCas9 and gRNA1798_ABE8.8_SpCas9, human versions of which (i.e., gRNA676_ABE8.8_SpCas9 and gRNA696_ABE8.8_SpCas9) exhibited high target base-editing and functional C3 protein knockdown in PXB-cells and PHH co-cultures, were transfected in triplicate in primary cyno (Macaca fascicularis) hepatocyte (PCH) co-cultures. sgRNA_088_ABE8.8_SpCas9 was transfected as a positive control, and an untreated condition was included as a negative control. All conditions were performed in triplicate. To assess functional C3 knockdown, cell supernatants were collected and stored at −80° C. Such collections were performed just prior to transfection (3-day incubation), as well as 4-, 7-, 10-, and 13-days post-transfection. An additional media change was performed 1-day post-transfection, but the supernatant was discarded. Genomic DNA was harvested from cells 13 days post-transfection and editing efficiency was assessed by Next Generation Sequencing (NGS). A modified C3 ELISA assay was used to assess cyno C3 protein concentration in cell supernatants pre-transfection, as well as 7-days and 13-days post-transfection.

[0428] Pre-transfection, no significant difference in cyno C3 concentration was observed between samples (FIG. 14). By 7-days post-transfection, roughly 70% reductions in cyno C3 levels were observed for gRNA1793_ABE8.8_SpCas9 and gRNA1798_ABE8.8_SpCas9 as compared to sgRNA_088_ABE8.8_SpCas9, which did not edit within the C3 gene (FIG. 15). Similar trends were observed 13-days post-transfection (FIG. 16). Editing efficiencies for gRNA1793_ABE8.8_SpCas9 and gRNA1798_ABE8.8_SpCas9 were both high, at approximately 70% (FIGS. 15 and 16). This was comparable to the positive control sgRNA_088_ABE8.8_SpCas9 (FIGS. 15 and 16).

### Example 9: Reductions in Complement Component 3 (C3) Protein and RNA in FRG Liver-Humanized Mice Following On-Target Editing Using Base Editor Systems

[0429] Experiments were undertaken to assess on-target editing and complement component 3 (C3) protein and RNA knockdown using base editor systems in FRG liver-humanized mice. Since the base editor system containing the guide polynucleotide gRNA676 and the base editor ABE8.8 containing an SpCas9 nucleic acid programmable DNA binding protein domain (i.e., gRNA676_ABE8.8_SpCas9) exhibited both high editing rates and high C3 protein knockdown in in vitro primary hepatocyte experiments, the base editor system was further evaluated in vivo in mice. The base editor system was formulated with lipid nanoparticles (BL4 LNP) and administered via intravenous retroorbital plexus (RO) tail vein injection to liver-humanized mice Fah−/−Rag2−/−Il2rg−/− (FRG) mice with >70% human hepatocyte repopulation (Yecuris; Donor: HHF04030) at 2.0 and 0.3 mg/kg doses. Tris-buffered saline (TBS) alone was also delivered to control animals. Serum samples were collected pre-administration as well as 7 days and 14 days post-administration. Flash frozen liver fragments were collected upon study termination for next-generation sequencing (NGS), and liver fragments frozen in RNAlater were collected for analysis of C3 RNA levels. NGS was utilized to assess editing levels at the target locus, and a meso scale discovery (MSD) assay was used to measure serum protein levels. RT-qPCR was used to measure C3 RNA levels in the liver.

[0430] 14 days post-administration, an approximately 90% reduction in serum C3 protein levels relative to pre-administration C3 protein levels was observed in animals dosed at 2.0 mg/kg (FIG. 20). This reduction in C3 protein levels corresponded with approximately 90% A>G editing at the target site (a splice site) in harvested liver tissue and an approximately 90% reduction in liver C3 RNA levels compared to unedited control animals administered tris-buffered saline (TBS) in place of the base editor system (FIGS. 20 and 21). Approximately 45-75% on-target editing was observed in animals dosed at 0.3 mg/kg (FIG. 20). Editing rates correlated well with reductions in levels of C3 protein and RNA in animals dosed at 0.3 mg/kg with animals exhibiting higher editing also exhibiting higher reductions in C3 protein and RNA levels (FIGS. 20 and 21). The measured reductions in C3 RNA were confirmed using 4 different Taqman probes spanning the length of the C3 gene, including Hs01100912_m1 that binds upstream of the gRNA676 target splice site (Exon 8 splice site donor) (FIG. 21).

### Example 10: Effect of Heavy Chemical Modifications on On-Target Editing and Complement Component 3 (C3) Protein Knockdown in FRG Liver-Humanized Mice Using Base Editor Systems

[0431] Experiments were undertaken to determine the effect of heavy chemical modifications of guide polynucleotides on on-target editing and reductions in C3 protein levels in FRG liver-humanized mice using base editing systems. Since both the base editor systems gRNA676_ABE8.8_SpCas9 and gRNA696_ABE8.8_SpCas9 exhibited high editing and C3 protein knockdown in in vitro primary hepatocyte experiments, and gRNA676_ABE8.8_SpCas9 further exhibited high potency (i.e., base editing levels at a particular dose of the base editor system) in FRG liver-humanized mice, experiments were undertaken to determine the in vivo editing efficacy of the gRNA696_ABE8.8_SpCas9 base editor system, and to determine in vivo the impact of guide polynucleotide heavy chemical modifications on the two base editor systems. To assess in vivo performance for gRNA696_ABE8.8_SpCas9 and base editor system efficacy improvements associated with various guide heavy chemical modification schemes, the base editor systems gRNA676_ABE8.8_SpCas9, gRNA696_ABE8.8_SpCas9, with and without guide polynucleotide heavy chemical modifications (i.e., the guides gRNA2202-gRNA2209) were formulated with lipid nanoparticles (BL4 LNP) and were administered via intravenous retroorbital plexus (RO) tail vein injection in liver-humanized mice Fah−/−Rag2−/−Il2rg−/− (FRG) mice with >70% human hepatocyte repopulation (Yecuris; Donor: HHF04030) at a 0.3 mg/kg dose. sgRNA_088_ABE8.8_SpCas9 was formulated and administered as a control. Serum samples were collected pre-administration as well as 7 days and 14 days post-administration. Flash frozen liver fragments were collected upon study termination for next-generation sequencing (NGS), which was used to assess editing levels at the target locus. A human C3 meso scale discovery (MSD) assay was used to measure serum C3 protein levels.

[0432] 14 days post-administration, approximately 65-80% A>G on-target editing was observed at the target splice site in harvested liver tissue for gRNA676_ABE8.8_SpCas9 and for variants of the base editor system containing guide polynucleotides with heavy chemical modifications (gRNA2202-gRNA2205), with gRNA2203_ABE8.8_SpCas9 associated with increased editing rates relative to gRNA676_ABE8.8_SpCas9 (FIG. 22). This on-target editing corresponded to a reduction in serum C3 protein levels of ˜55-65% at 14-days post-administration compared to pre-administration C3 protein levels, with gRNA2203_ABE8.8_SpCas9 also associated with a greater reduction in C3 protein levels relative those associated with gRNA676_ABE8.8_SpCas9 (FIG. 22). The base editor system gRNA696_ABE8.8_SpCas9 or variants thereof containing guide polynucleotides with heavy chemical modifications (gRNA2206-gRNA2209) were associated with on-target editing levels of less than approximately 40% at the target splice site (FIG. 22).

### Example 11: Differences in Base Editing Rates for Human and Cynomolgous Monkey Target Sites in Primary Human Hepatocytes (PHH) and Primary Cyno Hepatocytes (PCH)

[0433] Experiments were undertaken in primary human hepatocytes (PHH) and in primary cyno hepatocytes (PCH) to determine editing efficiency differences between base editor systems containing gRNA2202, which targets the human C3 gene for base editing, and base editor systems containing gRNA2200, which targets the cynomolgous monkey C3 gene for base editing. In previous experiments, gRNA2202_ABE8.8_SpCas9 yielded approximately 70% editing and reductions in both C3 protein and RNA levels in FRG liver-humanized mice dosed at 0.3 mg/kg. The human sequence targeted by gRNA2202 for base editing is not conserved in cynomolgous monkeys. In previous experiments, the base editor system gRNA2200_ABE8.8_SpCas9, which contains gRNA2200 targeting the cynomolgous monkey C3 gene, was associated with base editing rates of approximately 20% at a dose of 1.5 mg/kg in cynomolgous monkeys. To determine potential efficacy differences between the cynomolgous monkey C3 gene targeting and human C3 gene targeting guides, primary cyno hepatocytes (PCH) were transfected with the base editor system gRNA2200_ABE8.8_SpCas9 and primary human hepatocyte (PHH) were transfected with the base editor system gRNA2202_ABE8.8_SpCas9. The base editor system sgRNA_088_ABE8.8_SpCas9 was used as a control for base editing in both cell types because the sequence targeted for editing by this base editor system is conserved between humans and cynomolgous monkeys. Each base editor system was transfected into the cells at 1000, 100, 50, 10, 5, 1, 0.5, 0.1, and 0.01 ng doses of the base editor systems (mass of the guide polynucleotide and mRNA encoding the base editor, combined) in a 3:1 editor to sgRNA ratio. Universal Human Reference RNA (Life Technologies, QS0639) was used to normalize all wells to a 1000 ng total mRNA dose. All conditions were evaluated in duplicate. Genomic DNA was harvested from cells 3 days post-transfection and editing efficiency was assessed by next-generation sequencing (NGS). Data was fit to a variable slope (four parameter) curve, and EC50s were calculated for all base editor systems.

[0434] The on-target editing data fit well to a variable slope (four parameter) curve, with R² values of 0.99 or greater for all base editor systems evaluated (FIG. 23). Comparison of EC50s revealed that the EC50 in PCH cells for gRNA2200_ABE8.8_SpCas9 was 13.63× higher than that observed for gRNA2202_ABE8.8_SpCas9 in PHH cells (65.44 ng vs 4.80 ng) (FIG. 23). Comparison of EC50s for the base editor system sgRNA_088_ABE8.8_SpCas9 revealed that the EC50 was also 9.71× higher in PCH cells compared to PHH cells (33.12 ng vs 3.41 ng) despite the sequence targeted for base editing being conserved between PCH and PHH (FIG. 23).

### Example 12: Differences in Base Editing Rates for Human and Cynomolgous Monkey Target Sites in an Engineered Hek293T Cell Line

[0435] Given the difference in base editing rates observed between PCH cells and PHH cells using similar base editing systems, experiments were undertaken to determine the cause for this difference in base editing rates. To this end, an engineered Hek293T cell line was generated that contained the protospacer+PAM sequence for both the human sequence targeted by the gRNA2202 guide and the cynomolgous monkey sequence targeted by the gRNA2200 guide, where the target sequences were separated from one another by 50 bp. This cell line was separately transfected with the base editor systems gRNA2202_ABE8.8_SpCas9 and gRNA2200_ABE8.8_SpCas9 to assess differences in base editing between the two base editor systems. The cells were transfected with the base editor systems in a 1:3 serial dilution series from 300 ng to 0.15 ng total base-editing dose (2:1 editor to sgRNA ratio), where “total base-editing dose” indicates the combined mass of the guide polynucleotide and an mRNA encoding the base editor. Non-translating ABE8.8-encoding mRNA was used to normalize all wells to a 300-400 ng total RNA dose. All conditions were evaluated in triplicate. Genomic DNA was harvested from cells 3 days post-transfection and editing efficiency was assessed by next-generation sequencing (NGS). Data was fit to a variable slope (four parameter) curve, and EC50s were calculated for both base editor systems.

[0436] The on-target editing data fit well to a variable slope (four parameter) curve, with R2 values of 0.98-0.99 for both base editor systems (FIG. 24). Comparison of EC50s revealed that the EC50 for gRNA2200_ABE8.8_SpCas9 was approximately 3.5× higher than that observed for gRNA2202_ABE8.8_SpCas9 (2.128 ng vs 0.6132 ng) (FIG. 24).

### Example 13: ABE Editor Optimization for gRNA676, gRNA696, gRNA661, and gRNA715

[0437] Base editor systems containing the guides gRNA676, gRNA696, gRNA661, and gRNA715, targeting the C3 gene for base editing exhibited high editing and C3 protein knockdown in PXB-cells and PHH co-culture studies. Accordingly, experiments were undertaken to optimize the base editors used in adenosine deaminase base editor (ABE) systems containing these guides. Initial ABE optimization was carried out as described above in Example 3 for these guides to optimize editing performance. To further optimize editing performance for base editor systems containing the guides gRNA676, gRNA696, or gRNA661, base editor systems containing the guides and one of 16 base editors containing 8^{th} and 9^{th} generation TadA* deaminase domain variants and/or Cas9 variants were screened in HepG2 cells (Tables 8-10). To further optimize editing performance for base editor systems containing the guide gRNA715, base editor systems containing the guide and one of base editors containing 8^{th} and 9^{th} generation TadA* deaminase domain variants were screened in HepG2 cells (Table 11). The base editor system sgRNA_088_ABE8.8_SpCas9 was used as a positive control for base editing, and an untreated condition was also included as a negative control. The base editor systems were transfected in a 1:3 serial dilution series from 300 ng to 0.02 ng total base-editing dose (2:1 editor to sgRNA ratio), where “total base-editing dose” refers to the combined total mass of the guide polynucleotide and mRNA encoding the base editor. Non-translating ABE8.8-encoding mRNA or Universal Human Reference RNA (Life Technologies, QS0639) was used to normalize all wells to a 300-400 ng total RNA dose. All conditions were evaluated in triplicate. Genomic DNA was harvested from cells 3 days post-transfection and editing efficiency was assessed by next-generation sequencing (NGS). Data was fit to a variable slope (four parameter) curve, and EC50s were calculated all guide+editor combinations.

TABLE 8
Summary of base editor system data.

| | | | | Max | | |
|---|---|---|---|---|---|---|
| gRNA | TadA* | Linker | Cas9 | Editing | EC50 | R Square |
| gRNA676 | 8.8 | XTEN | SpCas9 | 93.15 | 1.010 | 0.9940 |
| gRNA676 | 8.13 | XTEN | SpCas9 | 95.97 | 1.206 | 0.9927 |
| gRNA676 | 8.17 | XTEN | SpCas9 | 89.39 | 2.989 | 0.9917 |
| gRNA676 | 8.20 | XTEN | SpCas9 | 94.94 | 2.322 | 0.9876 |
| gRNA676 | 9.47^{‡} | XTEN | SpCas9 | 94.15 | 2.075 | 0.9908 |
| gRNA676 | 9.48^{‡} | XTEN | SpCas9 | 85.11 | 1.497 | 0.9850 |
| gRNA676 | 9.49^{‡} | XTEN | SpCas9 | 93.63 | 2.555 | 0.9896 |
| gRNA676 | 9.50^{‡} | XTEN | SpCas9 | 93.19 | 1.624 | 0.9892 |
| gRNA676 | 9.51^{‡} | XTEN | SpCas9 | 85.55 | 1.903 | 0.9785 |
| gRNA676 | 9.52^{‡} | XTEN | SpCas9 | 90.29 | 1.289 | 0.9852 |
| gRNA676 | 8.13-m | XTEN | SpCas9_A1283D | 81.73 | 39.30 | 0.9845 |
| gRNA676 | 8.13-m | XTEN | SpCas9_A1283D_ | 68.23 | 32.38 | 0.9509 |
| | | | E1250K | | | |
| gRNA676 | 8.13-m | XTEN | SpCas9_Q844R_ | 85.42 | 1.603 | 0.9880 |
| | | | V842L_F846Y_ | | | |
| | | | L847M_I852F | | | |
| gRNA676 | 8.13-m | KGPKPKKEESE | SpCas9_A1283D | 71.73 | 21.15 | 0.9516 |
| | | K (SEQ ID NO: | | | | |
| | | 940) | | | | |
| gRNA676 | 8.13-m | KGPKPKKEESE | SpCas9_A1283D_ | 88.79 | 2.161 | 0.9889 |
| | | K (SEQ ID NO: | E1250K | | | |
| | | 940) | | | | |
| gRNA676 | 8.13-m | KGPKPKKEESE | SpCas9_Q844R_ | 92.74 | 2.131 | 0.9927 |
| | | K (SEQ ID NO: | V842L_F846Y_ | | | |
| | | 940) | L847M I852F | | | |
| sgRNA_ | 8.8 | XTEN | SpCas9 | 95.61 | 1.908 | 0.9928 |
| 088 | | | | | | |

^{‡}TadA*9.47 corresponds to TadA*8.8 with a V82T alteration; TadA*9.48 corresponds to TadA*8.8 with the alterations V82T, Y147T, and Q154S; TadA*9.49 corresponds to TadA*8.17 with a V82T alteration; TadA*9.50 corresponds to TadA*8.17 with the alterations V82T, Y147T, and Q154S; TadA*9.51 corresponds to TadA*8.20 with a V82T alteration; TadA*9.52 corresponds to TadA*8.20 with the alteratinos V82T, Y147T, and Q154S.

TABLE 9
Summary of base editor system data.

| | | | | Max | | |
|---|---|---|---|---|---|---|
| gRNA | TadA* | Linker | Cas9 | Editing | EC50 | R Square |
| gRNA696 | 8.8 | XTEN | SpCas9 | 82.78733 | 12.78 | 0.9932 |
| gRNA696 | 8.13 | XTEN | SpCas9 | 90.243 | 3.344 | 0.9951 |
| gRNA696 | 8.17 | XTEN | SpCas9 | 71.17233 | 17.87 | 0.9966 |
| gRNA696 | 8.20 | XTEN | SpCas9 | 89.97033 | 3.925 | 0.9967 |
| gRNA696 | 9.47^{‡} | XTEN | SpCas9 | 87.69333 | 6.285 | 0.9979 |
| gRNA696 | 9.48^{‡} | XTEN | SpCas9 | 89.541 | 5.348 | 0.9965 |
| gRNA696 | 9.49^{‡} | XTEN | SpCas9 | 80.14267 | 12.33 | 0.9976 |
| gRNA696 | 9.50^{‡} | XTEN | SpCas9 | 79.591 | 10.07 | 0.9981 |
| gRNA696 | 9.51^{‡} | XTEN | SpCas9 | 84.588 | 3.550 | 0.9909 |
| gRNA696 | 9.52^{‡} | XTEN | SpCas9 | 89.43767 | 1.721 | 0.9976 |
| gRNA696 | 8.13-m | XTEN | SpCas9_A1283D | 69.04133 | 33.88 | 0.9964 |
| gRNA696 | 8.13-m | XTEN | SpCas9_A1283D | 69.15167 | 24.37 | 0.9905 |
| | | | E1250K | | | |
| gRNA696 | 8.13-m | XTEN | SpCas9_Q844R_ | 88.69933 | 1.495 | 0.9881 |
| | | | V842L_F846Y_ | | | |
| | | | L847M_I852F | | | |
| gRNA696 | 8.13-m | KGPKPKKEES | SpCas9_A1283D | 70.645 | 12.91 | 0.9860 |
| | | EK (SEQ ID | | | | |
| | | NO: 940) | | | | |
| gRNA696 | 8.13-m | KGPKPKKEES | SpCas9_A1283D_ | 91.195 | 0.9946 | 0.9922 |
| | | EK (SEQ ID | E1250K | | | |
| | | NO: 940) | | | | |
| gRNA696 | 8.13-m | KGPKPKKEES | SpCas9_Q844R_ | 90.81733 | 1.206 | 0.9893 |
| | | EK (SEQ ID | V842L_F846Y_ | | | |
| | | NO: 940) | L847M_I852F | | | |
| gRNA676 | 8.8 | XTEN | SpCas9 | 91.992 | 0.3646 | 0.9934 |
| sgRNA_ | 8.8 | XTEN | SpCas9 | 88.99567 | 0.9758 | 0.9966 |
| 088 | | | | | | |

^{‡}TadA*9.47 corresponds to TadA*8.8 with a V82T alteration; TadA*9.48 corresponds to TadA*8.8 with the alterations V82T, Y147T, and Q154S; TadA*9.49 corresponds to TadA*8.17 with a V82T alteration; TadA*9.50 corresponds to TadA*8.17 with the alterations V82T, Y147T, and Q154S; TadA*9.51 corresponds to TadA*8.20 with a V82T alteration; TadA*9.52 corresponds to TadA*8.20 with the alteratinos V82T, Y147T, and Q154S.

TABLE 10
Summary of base editor system data.

| gRNA | TadA* | Linker | Cas9 | Max Editing | EC50 | R Square |
|---|---|---|---|---|---|---|
| gRNA661 | 8.8 | XTEN | SpCas9 | 82.425 | 13.27 | 0.9857 |
| gRNA661 | 8.13 | XTEN | SpCas9 | 88.862 | 4.282 | 0.9980 |
| gRNA661 | 8.17 | XTEN | SpCas9 | 83.41233 | 10.93 | 0.9946 |
| gRNA661 | 8.20 | XTEN | SpCas9 | 89.19967 | 3.500 | 0.9951 |
| gRNA661 | 9.47^{‡} | XTEN | SpCas9 | 85.88867 | 5.130 | 0.9944 |
| gRNA661 | 9.48^{‡} | XTEN | SpCas9 | 87.88933 | 4.779 | 0.9944 |
| gRNA661 | 9.49^{‡} | XTEN | SpCas9 | 86.47333 | 7.819 | 0.9965 |
| gRNA661 | 9.50^{‡} | XTEN | SpCas9 | 84.037 | 6.974 | 0.9962 |
| gRNA661 | 9.51^{‡} | XTEN | SpCas9 | 88.68933 | 3.633 | 0.9958 |
| gRNA661 | 9.52^{‡} | XTEN | SpCas9 | 91.60967 | 2.365 | 0.9948 |
| gRNA661 | 8.13-m | XTEN | SpCas9_A1283D | 65.08633 | 106.9 | 0.9978 |
| gRNA661 | 8.13-m | XTEN | SpCas9_A1283D_ | 70.80867 | 278.8 | 0.9971 |
| | | | E1250K | | | |
| gRNA661 | 8.13-m | XTEN | SpCas9_Q844R_ | 88.69933 | 1.495 | 0.9970 |
| | | | V842L_F846Y_ | | | |
| | | | L847M_I852F | | | |
| gRNA661 | 8.13-m | KGPKPKKEES | SpCas9_A1283D | 70.645 | 12.91 | 0.9962 |
| | | EK (SEQ ID | | | | |
| | | NO: 940) | | | | |
| gRNA661 | 8.13-m | KGPKPKKEES | SpCas9_A1283D_ | 91.195 | 0.9946 | 0.9969 |
| | | EK (SEQ ID | E1250K | | | |
| | | NO: 940) | | | | |
| gRNA661 | 8.13-m | KGPKPKKEES | SpCas9_Q844R_ | 90.81733 | 1.206 | 0.9951 |
| | | EK (SEQ ID | V842L_F846Y_ | | | |
| | | NO: 940) | L847M_I852F | | | |
| gRNA676 | 8.8 | XTEN | SpCas9 | 91.992 | 0.3646 | 0.9957 |
| sgRNA_ | 8.8 | XTEN | SpCas9 | 88.99567 | 0.9758 | 0.9967 |
| 088 | | | | | | |

^{‡}TadA*9.47 corresponds to TadA*8.8 with a V82T alteration; TadA*9.48 corresponds to TadA*8.8 with the alterations V82T, Y147T, and Q154S; TadA*9.49 corresponds to TadA*8.17 with a V82T alteration; TadA*9.50 corresponds to TadA*8.17 with the alterations V82T, Y147T, and Q154S; TadA*9.51 corresponds to TadA*8.20 with a V82T alteration; TadA*9.52 corresponds to TadA*8.20 with the alteratinos V82T, Y147T, and Q154S.

TABLE 11
Summary of base editor system data.

| | | | | Target | | |
|---|---|---|---|---|---|---|
| | | | | Editing | | |
| gRNA | TadA* | Linker | Cas9 | (5A)^{‡} | EC50 | R Square |
| gRNA715 | 8.8 | XTEN | SpCas9-VRQR | 45.3 | 37.55 | 0.9958 |
| gRNA715 | 8.13 | XTEN | SpCas9-VRQR | 67.45333 | 16.01 | 0.9927 |
| gRNA715 | 8.17 | XTEN | SpCas9-VRQR | 41.6 | 31.13 | 0.9963 |
| gRNA715 | 8.20 | XTEN | SpCas9-VRQR | 64.05333 | 13.78 | 0.9936 |
| gRNA715 | 9.51# | XTEN | SpCas9-VRQR | 64.95667 | 9.787 | 0.9955 |
| gRNA676 | 8.8 | XTEN | SpCas9 | 91.72533 | 1.155 | 0.9957 |
| sgRNA_ | 8.8 | XTEN | SpCas9 | 88.59567 | 1.129 | 0.9967 |
| 088 | | | | | | |

^{‡}Target edit 5A refers to the base shown in bold in the following protospacer sequence CCGCAGATCTGGGACGTGGT (SEQ ID NO: 483)
^{#}TadA*9.51 corresponds to TadA*8.20 with a V82T alteration.

[0438] Five editor variants (ABE8.13_SpCas9, ABE9.48_SpCas9, ABE9.50_SpCas9, ABE9.52_SpCas9) exhibited similar potency, where “potency” indicates the level of base editing achieved at a particular dose, and maximum editing to ABE8.8_SpCas9 when paired with gRNA676 (Table 8). Five editor variants (ABE8.13_SpCas9, ABE8.20_SpCas9, ABE9.51_SpCas9, ABE9.52_SpCas9, ABE8.13_SpCas9_A1283D_E1250K [KGPKPKKEESEK (SEQ ID NO: 940) linker]) exhibited similar or higher potency and maximum editing to ABE8.8_SpCas9 when paired with gRNA696 (Table 9). Seven editor variants (ABE8.13_SpCas9, ABE8.20_SpCas9, ABE9.47_SpCas9, ABE9.48_SpCas9, ABE9.51_SpCas9, ABE9.52_SpCas9, ABE8.13_SpCas9_A1283D_E1250K [KGPKPKKEESEK (SEQ ID NO: 940) linker]) exhibited similar or higher potency and maximum editing to ABE8.8_SpCas9 when paired with gRNA661 (Table 10). ABE9.51_SpCas9-VRQR exhibited higher potency to ABE8.13_SpCas9-VRQR when paired with gRNA715 (Table 11).

[0439] The editor variants identified above as showing good editing efficiencies when combined with each guide were further screened in primary human hepatocyte (PHH) monolayers at low sub-saturating doses.

[0440] For base editor systems containing gRNA676, PHH monolayers were transfected separately at 2.5 and 10 ng total base editing doses. Universal Human Reference RNA (Life Technologies, QS0639) was used to normalize conditions to a 300 ng total RNA dose. The guide sgRNA_088 was used as a positive editing control, and a untransfected condition was used as a negative control. All conditions were evaluated in triplicate. Genomic DNA was harvested from all cells 3 days post-transfection and editing efficiency was assessed by next-generation sequencing (NGS).

[0441] For the base editor systems containing gRNA696, gRNA661, and gRNA715 guide, PHH monolayers were transfected separately at 5 and 20 ng total base editing doses. Non-translating ABE8.8-encoding mRNA was used to normalize conditions to 300 ng total RNA dose. The guide sgRNA_088 was used as a positive editing control, and a untransfected condition was used as a negative control. All conditions were evaluated in triplicate. Genomic DNA was harvested from all cells 3 days post-transfection and editing efficiency was assessed by next-generation sequencing (NGS).

[0442] The base editor ABE9.48_SpCas9 was found to slightly improve on-target editing efficiency over ABE8.8_SpCas9 when paired with gRNA676 at both 2.5 ng and 10 ng total base-editing doses (FIG. 25). The base editor ABE8.13_SpCas9 was found to slightly improve on-target editing efficiency over ABE8.8_SpCas9 when paired with gRNA696 at both 5 ng and 20 ng base editing doses (FIGS. 26 and 27). The base editor ABE9.52_SpCas9 was found to significantly improve on-target editing efficiency over ABE8.8_SpCas9 when paired with gRNA661 at both 5 ng and 20 ng base editing doses (FIGS. 26 and 27). The base editor ABE9.51_SpCas9-VRQR did not improve on-target editing efficiency over ABE8.13_SpCas9-VRQR when paired with gRNA715 (FIG. 27).

### Example 14: Effects of Guide Polynucleotide Heavy Chemical Modifications and Optimized Adenosine Deaminase Base Editors (ABEs) on On-Target Editing and Reductions in Complement Component 3 (C3) Protein and RNA Levels Using Base Editor Systems in FRG Liver-Humanized Mice

[0443] As described above, it was determined that the base editor system gRNA676_ABE8.8_SpCas9 was associated with high on-target editing and functional complement component 3 (C3) protein knockdown in FRG liver-humanized mice. It was also found that the base editor system gRNA2203_ABE8.8_SpCas9, which contains the guide gRNA2203 having a heavy chemical modification scheme, demonstrated an improvement in on-target editing and functional complement component 3 (C3) in FRG liver-humanized mice. Further, base editor optimization studies in HepG2 cell lines and primary human hepatocytes suggested that use of the editor ABE9.48_SpCas9 in combination with gRNA676 improved performance over ABE8.8_SpCas9. Accordingly, given these results, the following experiments were undertaken to further optimize base editor systems containing the guide gRNA676 in FRG liver-humanized mice.

[0444] The base editor systems gRNA676_ABE8.8_SpCas9, gRNA676_ABE9.48_SpCas9, and gRNA2203_ABE8.8_SpCas9 were formulated with lipid nanoparticles (BL4 LNP) and administered via intravenous retroorbital plexus (RO) tail vein injection in liver-humanized mice Fah−/−Rag2−/−Il2rg−/−(FRG) mice with >70% human hepatocyte repopulation (Yecuris; Donor: HHF04030) at either 0.3 or 0.1 mg/kg total base editor doses (i.e., the combined mass of mRNA encoding the base editor and the guide polynucleotide). The base editor system gRNA3201_ABE8.8_SpCas9 containing the guide gRNA3201, which included an alternative chemical modification scheme, was also formulated and administered. The base editor system sgRNA_088_ABE8.8_SpCas9 was used as a control. Serum samples were collected pre-administration, as well as 7 days and 14 days post-administration. Flash frozen liver fragments were collected upon study termination for next-generation sequencing (NGS) that was utilized to assess editing levels at the target locus. A human C3 meso scale discovery (MSD) assay was used to measure serum C3 protein levels.

[0445] The base editor system gRNA676_ABE9.48_SpCas9 exhibited a slight improvement in editing over the base editor system gRNA676_ABE8.8_SpCas9 at a 0.1 mg/kg dose (average of 43% vs 33%) (FIG. 28). C3 protein knockdown was closely correlated with the level of on-target editing for all samples (e.g., a 33% editing efficiency generated an approximately 33% reduction C3 protein levels) (FIG. 28).

### Example 15: Effect of Guide Polynucleotide Heavy Chemical Modifications and Optimized Adenosine Deaminase Base Editors (ABEs) on On-Target Editing and Reductions in Complement Component 3 (C3) Protein and RNA Levels Using Base Editor Systems in FRG Liver-Humanized Mice

[0446] As demonstrated above, the base editor systems gRNA676_ABE8.8_SpCas9, gRNA661_ABE8.8_SpCas9, and gRNA715_ABE8.13_SpCas9-VRQR each were associated with high base editing efficiencies and with reductions in C3 protein levels in in vitro primary hepatocyte experiments. Also, base editor systems containing gRNA676 further exhibited high potency in multiple FRG liver-humanized mice studies, with gRNA676_ABE9.48_SpCas9 having a slight potency improvement over gRNA676_ABE8.8_SpCas9. Editor optimization studies in HepG2 cell lines and primary human hepatocytes also suggested that the base editor system gRNA661_ABE9.52_SpCas9 significantly improved performance over gRNA661_ABE8.8_SpCas9. Accordingly, given these results, experiments were undertaken to assess in vivo base editing performance for base editor systems targeting for editing the C3 gene target sites corresponding to gRNA676, gRNA661, or gRNA715, and to assess potential potency improvements (i.e., improvements in base editing at a given dose) achieved by modifying the base editor systems to include guides with various heavy chemical modification schemes and/or base editor variants.

[0447] The following base editor systems were formulated with lipid nanoparticles (BL4 LNP) and were administered via intravenous retroorbital plexus (RO) tail vein injection to liver-humanized mice Fah−/−Rag2−/−Il2rg−/− (FRG) mice with >70% human hepatocyte repopulation (Yecuris; Donor: HHF04030) at a 0.1 or 0.3 mg/kg total base editor system dose (i.e., the combined mass of the guide polynucleotide and the mRNA encoding the base editor): (Group 1) gRNA676_ABE9.48_SpCas9 and base editor systems containing one of two chemical modification variants of gRNA676, namely gRNA2203_ABE9.48_SpCas9 and gRNA4229_ABE9.48_SpCas9; (Group 2) gRNA661_ABE8.8_SpCas9, gRNA661_ABE9.52_SpCas9, and base editor systems containing one of two chemical modification variants of gRNA661, namely gRNA4231_ABE9.52_SpCas9 and gRNA4232_ABE9.52_SpCas9; and (Group 3) gRNA715_ABE8.13_SpCas9-VRQR, and base editor systems containing one of two chemical modification variants of gRNA715, namely gRNA4233_ABE8.13_SpCas9-VRQR and gRNA4234_ABE8.13_SpCas9-VRQR. As a control for base editing, sgRNA_088_ABE8.8_SpCas9 was similarly formulated and administered at a 0.3 mg/kg dose. Serum samples were collected pre-administration, as well as 7 days and 14 days post-administration. Flash frozen liver fragments were collected upon study termination for next-generation sequencing (NGS), and liver fragments frozen in RNAlater were collected for analysis of C3 RNA levels. NGS was utilized to assess target locus editing levels, and a human C3 meso scale discovery (MSD) assay was used to measure serum C3 protein levels. RT-qPCR was used to measure C3 RNA levels in the liver.

[0448] The base editor systems gRNA676_ABE9.48_SpCas9, gRNA2203_ABE9.48_SpCas9, and gRNA4229_ABE9.48_SpCas9 all exhibited similar levels of editing and reductions in C3 protein and RNA levels (FIGS. 29-33). The base editor system gRNA661_ABE9.52_SpCas9 provided a large potency improvement over the base editor system gRNA661_ABE8.8_SpCas9, and the base editor system gRNA4232_ABE9.52_SpCas9 performed similarly to the base editor system gRNA661_ABE9.52_SpCas9 in on-target editing and reduction in C3 protein levels, and, potentially, C3 RNA levels (FIGS. 29-33). Reductions in C3 protein and C3 RNA levels closely correlated with the level of on-target editing for all base editor systems evaluated (e.g., 33% editing generated about 33% reductions in C3 protein and RNA levels) (FIGS. 29-33). C3 RNA knockdown was consistent using 4 different Taqman probes spanning the length of the C3 gene, including Hs01100912_m1 that binds upstream of all target sites assessed (FIGS. 30-33).

### Example 16: gRNA-Dependent Genomic DNA Off-Target Editing by of Base Editor Systems

[0449] As demonstrated above, the base editor systems gRNA676_ABE8.8_SpCas9, gRNA696_ABE8.8_SpCas9, gRNA661_ABE8.8_SpCas9, and gRNA715_ABE8.8_SpCas9 exhibited high editing and C3 protein knockdown in in vitro primary hepatocyte experiments. Experiments were undertaken to assess off-target guide RNA-dependent genomic DNA editing for these base editor systems.

[0450] The base editor systems were transfected in HepG2 cells at saturating levels of base editing reagents (200 ng guide polynucleotide+600 ng editor mRNA). Base editor systems containing the base editor ABE8.8_SpCas9 and heavy chemically modified variants of gRNA676 (i.e., gRNA2202-gRNA2205) were also transfected to assess the effect of heavy guide modifications on off-target editing. All conditions were evaluated in triplicate. Genomic DNA was harvested from the transfected cells four days after transfection using MagMAX DNA Multi-Sample Ultra 2.0 Kit (Applied Biosystems). Also, in silico prediction of off-target loci was performed to nominate possible off-target loci based on the sequence of the on-target DNA site. These in silico predictions were used to design rhAmpSeq primer pools for each predicted off-target locus (designed and purchased from Integrated DNA Technologies). These rhAmpSeq pools were used to amplify the desired regions of genomic DNA using the rhAmpSeq Library Kit according to the manufacturer's protocol (Integrated DNA Technologies). Data analysis included performing a statistical test to compare a treated sample to an untreated sample. Off-target edits were indicated if they satisfied two criteria: (1) the off-target edit was reproducible (occurs in 2 replicates of treated cells) and (2) the off-target was an edit that is likely to arise from an ABE (specifically, an A-to-G edit that occurs in positions 4-9 of the protospacer). In the case that high quality data was not available for two replicates, all A-to-G edits that occurred in positions 4-9 of the protospacer were indicated.

[0451] At highly saturating levels of transfected base editing reagents, only one off-target was identified for the base editor system gRNA223_ABE8.8_SpCas9, two were identified for the base editor system gRNA661ABE8.8_SpCas9, and six were identified for the base editor system gRNA696_ABE8.8SpCas9 (Tables 12 and 13). Off-targets were not identified for any other base editor systems evaluated. None of the off-target hits identified were predicted to affect gene function or to affect gene splicing, and none were predicted to be pathogenic (Table 13).

TABLE 12
Summary of base editor system data.

| | Total | | | Associated | |
|---|---|---|---|---|---|
| | number of | | | Gene in | |
| | off-target | Missense | | Cancer | Max edit |
| Base Editor System | sites | Variants | Pathogenic | Census | frequency |
| gRNA696_ABE8.8_SpCas9 | 6 | 0 | 0 | 1 | 15.54 |
| gRNA661_ABE8.8_SpCas9 | 2 | 0 | 0 | 1 | 10.79 |
| gRNA2202_ABE8.8_SpCas9 | 0 | 0 | 0 | 0 | 0.00 |
| gRNA2203_ABE8.8_SpCas9 | 1 | 0 | 0 | 0 | 0.91 |
| gRNA2204_ABE8.8_SpCas9 | 0 | 0 | 0 | 0 | 0.00 |
| gRNA2205_ABE8.8_SpCas9 | 0 | 0 | 0 | 0 | 0.00 |
| gRNA676_ABE8.8_SpCas9 | 0 | 0 | 0 | 0 | 0.00 |
| gRNA715_ABE8.13_SpCas9-VRQR | 0 | 0 | 0 | 0 | 0.00 |

TABLE 13
Summary of base editor system data.

| | | | | % Off- | Gene |
|---|---|---|---|---|---|
| | | Off- | | target | expressed in |
| | Genomic | target | | editing | Liver/Spleen |
| Target Site | Coordinates | gene | Consequence | (Lipofection) | (TPM ≥1) |
| gRNA696_ABE8.8_Sp Cas9 | chr11: 119832692- | — | Intergenic | 15.54 | — |
| | 119832714(+) | | | | |
| | chr13: 69183940- | — | Intergenic | 5.33 | — |
| | 69183963(−) | | | | |
| | chr4: 152740822- | — | Intergenic | 1.51 | — |
| | 152740846(+) | | | | |
| | chr4: 173457166- | — | Intergenic | 1.32 | — |
| | 173457188(+) | | | | |
| | chr5: 35048253- | AGXT2 | <1 kb TSS | 0.52 | Liver |
| | 35048275(−) | | | | |
| | chr9: 121640708- | DAB2IP | Intronic | 8.23 | Liver, Spleen |
| | 121640730(−) | | | | |
| gRNA2203_ABE8.8_SpCas9 | chr4: 109237594- | COL25A1 | Intronic | 0.91 | n |
| | 109237616(+) | | | | |
| gRNA661_ABE8.8_SpCas9 | chr5: 151671752- | SPARC | Intronic | 10.79 | Liver, Spleen |
| | 151671774(+) | | | | |
| | chr2: 55136958- | — | Intergenic | 0.31 | n |
| | 55136980(+) | | | | |

| | | | Primary | | Gene | |
|---|---|---|---|---|---|---|
| | | Off- | Disease | | Tolerant | |
| | Genomic | target in | Association | OT edit a | to Loss of | Gene |
| Target Site | Coordinates | Enhancer | of Gene | known variant | Function | Description |
| gRNA696_ABE8.8_Sp Cas9 | chr11: 119832692- | n | — | 1 heterozygous | — | — |
| | 119832714(+) | | | individual in | | |
| | | | | gnomad | | |
| | chr13: 69183940- | n | — | heterozygous | — | — |
| | 69183963(−) | | | individuals in | | |
| | | | | gnomad (1), | | |
| | | | | TOPMED (1), | | |
| | | | | UKBB (1 | | |
| | | | | presumed | | |
| | | | | healthy) | | |
| | chr4: 152740822- | n | — | n | — | — |
| | 152740846(+) | | | | | |
| | chr4: 173457166- | n | — | n | — | — |
| | 173457188(+) | | | | | |
| | chr5: 35048253- | n | Renal | n | y | class III pyridoxal- |
| | 35048275(−) | | | | | phosphate-dependent |
| | | | | | | mitochondrial |
| | | | | | | aminotransferase. |
| | chr9: 121640708- | Liver, | Cardiac, | n | n | Ras GTPase- |
| | 121640730(−) | Spleen | Cancer | | | activating |
| | | | | | | protein (GAP). |
| gRNA2203_ABE8.8_SpCas9 | chr4: 109237594- | n | Ocular | n | y | Encode brain- |
| | 109237616(+) | | | | | specific membrane |
| | | | | | | associated collagen |
| gRNA661_ABE8.8_SpCas9 | chr5: 151671752- | Spleen | Bone | n | n | Encode cysteine- |
| | 151671774(+) | | | | | rich acidic matrix- |
| | | | | | | associated protein. |
| | chr2: 55136958- | n | n | n | — | |
| | 55136980(+) | | | | | |

### Example 17: Base Editor Systems Targeting the Complement Component 3 (C3) Start Codon or TATA Box in Hek293T Cells

[0452] As an alternative approach to splice site disruption for knocking down C3 protein expression, 9 guide polynucleotides targeting the C3 start codon and 12 guide polynucleotides targeting the C3 TATA box region (about −80 to −95 bp upstream of the C3 start codon) were designed and evaluated in Hek293T cells for on-target base editing rates when used in combination with base editors. These guide polynucleotides were used in base editor systems containing either an adenosine deaminase base editor (ABE) or a cytidine deaminase base editor (CBE), with some guides being used in combination with both an ABE and a CBE. All base editor systems were transfected in triplicate in Hek293T cells at an 800 ng (200 ng guide polynucleotide+600 ng editor-encoding mRNA) dose of total RNA. ABE8.8_sgRNA_088 was transfected as a positive base editing control, and an untreated condition was used as a negative control. Genomic DNA was harvested from cells 3-days post-transfection.

[0453] High on-target editing efficiencies (e.g., >40%) were observed for the base editor systems gRNA3342_ABE8.8_SpCas9, gRNA3343_ABE8.20_SpCas9-MQKFRAER, and gRNA3345_BE4_SaCas9-KKH start codon-targeting guides (FIG. 34). High editing efficiencies (e.g., >40%) were also observed for the base editor systems gRNA3350_ABE8.8_SpCas9, gRNA3351_ABE8.8_SpCas9, gRNA3352_ABE8.20_SpCas9-MQKFRAER, gRNA3355_ABE8.20_SpCas9-MQKFRAER, gRNA3356_ABE8.20_SpCas9-MQKFRAER, gRNA3357_ABE8.20_SpCas9-MQKFRAER, gRNA3358_ABE8.20_SpCas9-MQKFRAER, gRNA3359_ABE8.20_SpCas9-MQKFRAER, and gRNA3360_ABE8.20_SpCas9-MQKFRAER TATA box-targeting guides (FIG. 35).

### Example 18: C3 Base Editing and Functional Protein Knockdown Using Base Editor Systems Targeting the C3 Start Codon or TATA Box in Primary Human Hepatocyte (PHH) Co-Cultures

[0454] Twelve start codon-targeting and TATA box-targeting base editor systems that achieved favorable editing in Hek293T cells were selected for screening in primary human hepatocyte (PHH) co-cultures to assess editing efficiency and the capacity for functional knockdown of C3 protein expression. Base editor systems were transfected following a 3-day cell incubation. The positive editing control base editor system sgRNA_088_ABE8.8_SpCas9 was also transfected, and an untreated condition was used as a negative control. All conditions were evaluated in triplicate. To assess functional C3 protein knockdown, cell supernatants were collected and stored at −80° C. Such collections were performed just prior to transfection (3-day incubation), as well as 4-, 7-, 10-, and 13-days post-transfection. Genomic DNA was harvested from cells 13-days post-transfection and editing efficiency was assessed using next-generation sequencing (NGS). A human C3 meso scale discovery (MSD) assay was used to assess C3 protein concentration in cell supernatants pre-transfection and 13-days post-transfection.

[0455] Pre-transfection, clear differences in C3 protein concentration were observed between samples (FIG. 36). At 13-days post-transfection, clear reductions in C3 protein levels were observed for the start codon-targeting base editor systems gRNA3342_ABE8.8_SpCas9, gRNA3343_ABE8.20_SpCas9-MQKFRAER, gRNA3345_BE4_SaCas9-KKH, as compared to untreated and sgRNA_088_ABE8.8_SpCas9 13-day C3 protein levels (FIG. 37). On-target editing for all C3 start codon-targeting base editor systems (gRNA3342_ABE8.8_SpCas9, gRNA3343_ABE8.20_SpCas9-MQKFRAER, gRNA3345_BE4_SaCas9-KKH), were also all high, at approximately 60%, which was comparable to the positive editing control sgRNA_088_ABE8.8_SpCas9 (FIG. 37). Max editing rates were also high for many of the TATA box-targeting base editor systems (FIG. 37).

### Example 19: Base Editor System Optimization for Editing of the C3 Start Codon

[0456] As demonstrated above, two C3 start codon-targeting guide polynucleotides (gRNA3342 and gRNA3343) suitable for use in combination with an adenosine deaminase base editor were associated with high editing and C3 protein knockdown in PHH co-cultures. To optimize editing performance for these guides, base editing in HepG2 cells using base editor systems containing the guide gRNA3342 and base editors containing 8^{th} and 9^{th} generation TadA* variant deaminases and/or SpCas9 variants (Table 14) were evaluated, and base editing in HepG2 cells was also evaluated for 14 base editor systems containing the guide gRNA3343 and base editors containing TadA* variant deaminases and/or SpCas9-MQKFRAER variants (Table 15). The base editor systems sgRNA_088_ABE8.8_SpCas9 and gRNA676_ABE8.8_SpCas9, which targets a C3 splice site for base editing, were transfected as positive editing controls and benchmarks, and an untreated condition was used as a negative control. Base editor systems were transfected in a 1:3 serial dilution series from 300 ng to 0.02 ng total base-editing dose (2:1 editor to guide polynucleotide ratio), where “total base-editing dose” indicates the combined mass of the guide polynucleotide and the mRNA encoding the base editor. Non-translating ABE8.8-encoding mRNA was used to normalize RNA doses to a 300-400 ng total RNA dose. All conditions were evaluated in triplicate. Genomic DNA was harvested from cells 3 days post-transfection and editing efficiency was assessed by next-generation sequencing (NGS). Data was fit to a variable slope (four parameter) curve, and EC50s were calculated for all base editor systems.

TABLE 14
Summary of base editor system data.

| | | | | Max | | |
|---|---|---|---|---|---|---|
| gRNA | TadA* | Linker | Cas9 | Editing | EC50 | R Square |
| gRNA676 | 8.8 | XTEN | SpCas9 | 87.49 | 1.338 | 0.9967 |
| sgRNA_ | 8.8 | XTEN | SpCas9 | 81.14 | 1.382 | 0.9943 |
| 088 | | | | | | |
| gRNA3342 | 8.8 | XTEN | SpCas9 | 77.01 | 3.41 | 0.9844 |
| gRNA3342 | 8.13 | XTEN | SpCas9 | 90.20 | 1.395 | 0.9867 |
| gRNA3342 | 8.17 | XTEN | SpCas9 | 83.66 | 1.711 | 0.9938 |
| gRNA3342 | 8.2 | XTEN | SpCas9 | 79.96 | 1.198 | 0.9867 |
| gRNA3342 | 9.47^{‡} | XTEN | SpCas9 | 86.51 | 1.543 | 0.9904 |
| gRNA3342 | 9.48^{‡} | XTEN | SpCas9 | 87.06 | 0.8495 | 0.9809 |
| gRNA3342 | 9.49^{‡} | XTEN | SpCas9 | 83.92 | 1.345 | 0.9751 |
| gRNA3342 | 9.50^{‡} | XTEN | SpCas9 | 84.00 | 0.8019 | 0.9857 |
| gRNA3342 | 9.51^{‡} | XTEN | SpCas9 | 83.19 | 0.3942 | 0.9891 |
| gRNA3342 | 9.52^{‡} | XTEN | SpCas9 | 83.81 | 0.4809 | 0.9901 |
| gRNA3342 | 8.13-m | XTEN | SpCas9_A1283D | 75.19 | 7.181 | 0.9807 |
| gRNA3342 | 8.13-m | XTEN | SpCas9_A1283D_ | 74.64 | 8.875 | 0.9712 |
| | | | E1250K | | | |
| gRNA3342 | 8.13-m | XTEN | SpCas9_Q844R_ | 75.52 | 3.24 | 0.9795 |
| | | | V842L_F846Y_ | | | |
| | | | L847M_I852F | | | |
| gRNA3342 | 8.13-m | KGPKPKKEES | SpCas9_A1283D | 75.18 | 6.48 | 0.9931 |
| | | EK (SEQ ID | | | | |
| | | NO: 940) | | | | |
| gRNA3342 | 8.13-m | KGPKPKKEES | SpCas9_A1283D_ | 77.52 | 1.909 | 0.9895 |
| | | EK (SEQ ID | E1250K | | | |
| | | NO: 940) | | | | |
| gRNA3342 | 8.13-m | KGPKPKKEES | SpCas9_Q844R_ | 77.23 | 1.706 | 0.9922 |
| | | EK (SEQ ID | V842L_F846Y_ | | | |
| | | NO: 940) | L847M_I852F | | | |

^{‡}TadA*9.47 corresponds to TadA*8.8 with a V82T alteration; TadA*9.48 corresponds to TadA*8.8 with the alterations V82T, Y147T, and Q154S; TadA*9.49 corresponds to TadA*8.17 with a V82T alteration; TadA*9.50 corresponds to TadA*8.17 with the alterations V82T, Y147T, and Q154S; TadA*9.51 corresponds to TadA*8.20 with a V82T alteration; TadA*9.52 corresponds to TadA*8.20 with the alteratinos V82T, Y147T, and Q154S.

TABLE 15
Summary of base editor system data.

| | | | | Max | | |
|---|---|---|---|---|---|---|
| gRNA | TadA* | Linker | Cas9 | Editing | EC50 | R Square |
| gRNA676 | 8.8 | XTEN | WT | 91.59 | 1.684 | 0.9929 |
| sgRNA_ | 8.8 | XTEN | WT | 83.73 | 1.737 | 0.9862 |
| 088 | | | | | | |
| gRNA3343 | 8.20 | XTEN | WT | 47.61 | 8.648 | 0.9875 |
| gRNA3343 | 7.10 | XTEN | codon optimized | 43.24 | 8.302 | 0.9896 |
| | | | SpCas9- | | | |
| | | | MQKFRAER_I322V_ | | | |
| | | | S409I_E427G_ | | | |
| | | | R654L_R753G_R1114G | | | |
| gRNA3343 | 7.10 | XTEN | codon optimized | 44.26 | 6.452 | 0.9864 |
| | | | SpCas9- | | | |
| | | | MQKFRAER_I322V_ | | | |
| | | | S409I_E427G_R654L_ | | | |
| | | | R753G_R1114G | | | |
| gRNA3343 | 7.10 | XTEN | codon optimized | 42.60 | 5.994 | 0.9778 |
| | | | SpCas9- | | | |
| | | | MQKFRAER_I322V_ | | | |
| | | | S409I_E427G_R654L_ | | | |
| | | | R753G_R1114G_R1337K | | | |
| gRNA3343 | 7.10 | XTEN | codon optimized | 43.43 | 9.626 | 0.9869 |
| | | | SpCas9- | | | |
| | | | MQKFRAER_I322V_ | | | |
| | | | S409I_E427G_R654L_ | | | |
| | | | R753G_R1114G_ | | | |
| | | | Q1136Y_R1337K | | | |
| gRNA3343 | 7.10 | KGPKPKKEES | codon optimized | 46.29 | 14.36 | 0.9951 |
| | | EK (SEQ ID | SpCas9- | | | |
| | | NO: 940) | MQKFRAER_I322V_ | | | |
| | | | S409I_E427G_ | | | |
| | | | R654L_R753G_ | | | |
| | | | R1114G_M1135L_ | | | |
| | | | Q1136Y_R1337K | | | |
| gRNA3343 | 7.10 | XTEN | codon optimized | 43.99 | 21.91 | 0.9971 |
| | | | SpCas9- | | | |
| | | | MQKFRAER_I322V_ | | | |
| | | | S409I_E427G_ | | | |
| | | | R654L_R753G_R1114G_ | | | |
| | | | M1135L_Q1136Y_ | | | |
| | | | R1337K_A1283D | | | |
| gRNA3343 | 7.10 | XTEN | codon optimized | 42.63 | 17.03 | 0.9939 |
| | | | SpCas9- | | | |
| | | | MQKFRAER_I322V_ | | | |
| | | | S409I_E427G_ | | | |
| | | | R654L_R753G_R1114G_ | | | |
| | | | M1135L_R1337K_ | | | |
| | | | A1283D_E1250K | | | |
| gRNA3343 | 7.10 | XTEN | codon optimized | 44.24 | 5.341 | 0.9976 |
| | | | SpCas9- | | | |
| | | | MQKFRAER_I322V_ | | | |
| | | | S409I_E427G_R654L_ | | | |
| | | | R753G_R1114G_ | | | |
| | | | Q1136Y_A1283D_ | | | |
| | | | E1250K | | | |
| gRNA3343 | 7.10 | KGPKPKKEES | codon optimized | 40.80 | 16.21 | 0.9904 |
| | | EK (SEQ ID | SpCas9- | | | |
| | | NO: 940) | MQKFRAER_I322V_ | | | |
| | | | S409I_E427G_R654L_ | | | |
| | | | R753G_R1114G_ | | | |
| | | | M1135L_Q1136Y_ | | | |
| | | | R1337K_A1283D | | | |
| gRNA3343 | 7.10 | KGPKPKKEES | codon optimized | 38.60 | 52.76 | 0.9977 |
| | | EK (SEQ ID | SpCas9- | | | |
| | | NO: 940) | MQKFRAER I322V_ | | | |
| | | | S409I_E427G_R654L_ | | | |
| | | | R753G_R1114G_ | | | |
| | | | M1135L_Q1136Y_ | | | |
| | | | R1337K_A1283D_ | | | |
| | | | R220A_R221A | | | |
| gRNA3343 | 7.10 | XTEN | codon optimized | 33.44 | Un- | 0.97 |
| | | | SpCas9- | | stable | |
| | | | MQKFRAER_I322V_ | | | |
| | | | S409I_E427G_R654L_ | | | |
| | | | R753G_R1114G_ | | | |
| | | | M1135L_Q1136Y_ | | | |
| | | | R1337K_A1283D_ | | | |
| | | | R765A_Q768A | | | |
| gRNA3343 | 7.10 | XTEN | codon optimized | 34.01 | 2933 | 0.984 |
| | | | SpCas9- | | | |
| | | | MQKFRAER_I322V_ | | | |
| | | | S409I_E427G_R654L_ | | | |
| | | | R753G_R1114G_ | | | |
| | | | M1135L_Q1136Y_ | | | |
| | | | R1337K_A1283D_ | | | |
| | | | R765A_Q768A_ | | | |
| | | | K772A_K775A | | | |
| gRNA3343 | 7.10 | KGPKPKKEES | codon optimized | 44.58 | 23.73 | 0.9862 |
| | | EK (SEQ ID | SpCas9- | | | |
| | | NO: 940) | MQKFRAER_I322V_ | | | |
| | | | S409I_E427G_R654L_ | | | |
| | | | R753G_R1114G_ | | | |
| | | | M1135L_R1337K_ | | | |
| | | | A1283D_E1250K | | | |
| gRNA3343 | 7.10 | KGPKPKKEES | codon optimized | 46.71 | 8.186 | 0.9913 |
| | | EK (SEQ ID | SpCas9- | | | |
| | | NO: 940) | MQKFRAER_I322V_ | | | |
| | | | S409I_E427G_R654L_ | | | |
| | | | R753G_R1114G_ | | | |
| | | | Q1336Y_A1283D_ | | | |
| | | | E1250K | | | |

[0457] Seven base editor systems (gRNA3342_ABE8.13_SpCas9, gRNA3342_ABE8.20_SpCas9, gRNA3342_ABE9.48_SpCas9, gRNA3342_ABE9.49_SpCas9, gRNA3342_ABE9.50_SpCas9, gRNA3342_ABE9.51_SpCas9, gRNA3342_ABE9.52_SpCas9) exhibited similar or better potency (i.e., base editing levels observed at a particular dose) and maximum editing relative to the base editor system gRNA3342_ABE8.8_SpCas9 (Table 14). Four base editor systems (gRNA3343_ABE7.10_codon optimized SpCas9-MQKFRAER_I322V_S409I_E427G_R654L_R753G_R1114G_R1337K, gRNA3343_ABE7.10_codon optimized SpCas9-MQKFRAER_I322V_S409I_E427G_R654L_R753G_R1114G_Q1136Y_A1283D_E1250K, gRNA3343_ABE7.10_codon optimized SpCas9-MQKFRAER_I322V_S409I_E427G_R654L_R753G_R1114G_Q1336Y_A1283D_E1250K, and gRNA3343_ABE7.10_codon optimized SpCas9-MQKFRAER_I322V_S409I_E427G_R654L_R753G_R1114G) exhibited similar or better potency and maximum editing to the base editor system gRNA3343_ABE8.20_SpCas9-MQKFRAER (Table 15).

[0458] The base editor systems listed in the previous paragraph and containing the guide polynucleotide gRNA3342 or gRNA3343 were further evaluated for base editing in PHH monolayers at a low sub-saturating dose of 10 ng total base editing RNA (3:1 editor to guide polynucleotide ratio). Non-translating ABE8.8-encoding mRNA was used to normalize conditions to a 300 ng total RNA dose. The base editor systems sgRNA_088_ABE8.8_SpCas9 and gRNA676_ABE8.8_SpCas9, which targets a C3 splice site for base editing, were transfected as positive editing controls and benchmarks, and an untransfected condition was used as a negative control. All conditions were evaluated in duplicate. Genomic DNA was harvested from all cells 3 days post-transfection, and editing efficiency was assessed using next-generation sequencing (NGS).

[0459] The base editors ABE9.48_SpCas9 and ABE9.52_SpCas9 were found to improve on-target editing efficiency over ABE8.8_SpCas9 when paired with gRNA3342 (FIG. 38). The base editor ABE7.10_codon optimized SpCas9-MQKFRAER_I322V_S409I_E427G_R654L_R753G_R1114G_Q1336Y_A1283D_E1250K was found to improve on-target editing efficiency over ABE8.20_SpCas9-MQKFRAER when paired with gRNA3343 (FIG. 38).

### Example 20: Further Evaluation of Base Editing Using Base Editor Systems to Alter the C3 Start Codon in Primary Human Hepatocyte (PHH) Co-Culture

[0460] The base editing efficacies of the following base editor systems was evaluated again in PHH co-cultures: gRNA3342_ABE9.48_SpCas9, gRNA3343_ABE7.10_codon optimized SpCas9-MQKFRAER_I322V_S409I_E427G_R654L_R753G_R1114G_Q1336Y_A1283D_E1250K, and gNA3345_BE4_SaCas9-KKH. The base editor systems were transfected in PHH co-cultures following a 3-day cell incubation to assess editing efficiency and the capacity for functional knockdown of C3 protein expression. The base editor systems sgRNA_088_ABE8.8_SpCas9 and gRNA676_SpCas9_ABE8.8, which targets a C3 splice site for base editing, were also transfected as positive controls for editing and C3 protein knockdown, respectively. Dead ABE8.20_Cas9 editors (gRNA3342_dABE8.20_E59A_D108N_SpCas9, gRNA3343_dABE8.20_E59A_D108N_SpCas9-MQKFRAER, gRNA3345_dABE8.20_E59A_D108N_SaCas9-KKH, and gRNA676_dABE8.20_E59A_D108N_SpCas9) were also included to assess contributions of promoter occupancy to any observed C3 protein knockdown. An untreated condition was used as a negative control, and all conditions were evaluated in triplicate. To assess functional C3 protein knockdown, cell supernatants were collected and stored at −80° C. Such collections were performed just prior to transfection (3-day incubation), as well as 4-, 7-, 10-, and 13-days post-transfection. Genomic DNA was harvested from cells 13-days post-transfection and editing efficiency was assessed using next-generation sequencing (NGS). A human C3 meso scale discovery (MSD) assay was used to assess C3 protein concentration in cell supernatants pre-transfection and 13-days post-transfection.

[0461] Negligible variability between samples was observed for pre-transfection C3 protein concentrations (FIG. 39). 13-days post-transfection, clear reductions in C3 protein levels were observed for the start-codon targeting base editor systems gRNA3342_ABE9.48_SpCas9, gRNA3343_ABE7.10_codon optimized SpCas9-MQKFRAER_I322V_S409I_E427G_R654L_R753G_R1114G_Q1336Y_A1283D_E1250K, and gRNA3345_BE4_SaCas9-KKH relative to sgRNA_088_ABE8.8_SpCas9 and untreated controls (FIG. 40). This reduction in C3 protein levels was comparable to that associated with the splice-site targeting gRNA676_ABE8.8_SpCas9, which, as demonstrated above, exhibited a strong capacity for C3 protein knockdown in FRG liver-humanized mice (FIG. 40). Editing efficiencies for the base editor systems gRNA3342_ABE9.48_SpCas9, gRNA3343_ABE7.10_codon optimized SpCas9-MQKFRAER_I322V_S409I_E427G_R654L_R753G_R1114G_Q1336Y_A1283D_E1250K, gRNA3345_BE4_SaCas9-KKH, and gRNA676_ABE8.8_SpCas9 were all high at approximately 50-60% (FIG. 40). All dead ABE8.20_Cas9 conditions yielded no on-target editing or C3 protein knockdown (FIG. 40), suggesting promoter occupancy was not a major driver of protein knockdown observed for these base editor systems, thereby confirming that reductions in C3 protein levels were associated with the base editing.

### Example 21: Complement Component 3 (C3) Mutant Guide Screening in Hek293T Cells

[0462] Following complement pathway activation, C3 is cleaved between residues R748 and S749 by C3 convertases to form two bioactive fragments, C3a and C3b, that play important roles in the complement response. C3a is an anaphylatoxin that plays an important role in immune system modulation, and C3b is essential for amplification of the complement response and induction of the complement system's terminal pathway, by which foreign cells are lysed. C3b is also essential for the process of opsonization, by which C3b is attached to the surface of foreign cells and cellular debris, marking that surface for phagocytosis and degradation.

[0463] As an alternative strategy to full C3 gene knock-out (KO), base-editing technology was utilized to install mutations in amino acid residues important for C3 functions. In particular, guide+editor combinations (i.e., base editor systems) were designed targeting residues important for C3 cleavage and activation by C3 convertases, including R748. Guide+editor combinations (i.e., base editor systems) were also designed targeting residues important for C3b opsonization, including the opsonizing cysteine C1010 and a number of supporting residues, including Q1013, E1128, and H1126.

[0464] 19 guides, listed in Table 2, were designed to be used to mutate residues important for 1) C3 cleavage by C3 convertases or 2) C3b opsonization. Guides used either an ABE or CBE deaminase, with 13 guides being screened with both an ABE and CBE deaminase. All 32 guide-editor combinations (i.e., 19+13) were screened for use in editing the C3 gene at the targeted site. Editor mRNA+sgRNA were transfected in triplicate in Hek293T cells at a saturating 800 ng (200 ng guide+600 ng editor mRNA) dose of total RNA for all samples. In addition to the guide-editor pairs of interest, the positive control guide-editor pair sgRNA_088_ABE8.8_SpCas9 (i.e., ABE8.8 containing an SpCas9 napDNAbp domain) known to be effective at editing sites outside of the C3 gene was also tested. An untreated condition was included as a negative control. Genomic DNA was harvested from cells 3-days post-transfection.

[0465] Three guide+editor combinations were identified that exhibited appreciable editing at residues hypothesized to play a role in opsonization (FIG. 17). These included gRNA821_BE4_SpCas9, gRNA837_ABE8.8_SpCas9-VRQR, and gRNA838_ABE8.8_SpCas9-VRQR. In addition to on-target editing, gRNA821_BE4_SpCas9 and gRNA838_ABE8.8_SpCas9-VRQR also generated bystander mutations: gRNA821_BE4_SpCas9 generated a bystander mutation at M11291, and gRNA838_ABE8.8_SpCas9-VRQR generated two bystander mutations: Q1127R and I1125M.

[0466] Three guide+editor combinations were identified that exhibited appreciable editing at residue R748, which comprises part of the cleavage site recognized by C3 convertase (FIG. 18). These included gRNA827_ABE8.8_SpCas9, gRNA828_ABE8.8_SpCas9 and gRNA829_ABE8.8_SpCas9. gRNA829_ABE8.8_SpCas9 generated an additional bystander mutation at S749G, which also comprises part of the C3 convertase cleavage site.

### Example 22: Comparison of Base Editing Systems Targeting C3 Residues Important for Opsonization or C3 Convertase Cleavage in HepG2 Cells

[0467] As demonstrated above, at saturating levels of base editing reagents, the base editing systems gRNA821_BE4_SpCas9, gRNA837_ABE8.8_SpCas9-VRQR, and gRNA838_ABE8.8_SpCas9-VRQR were associated with appreciable editing at C3 residues believed to play a role in opsonization. Also, the base editor systems gRNA827_ABE8.8_SpCas9, gRNA828_ABE8.8_SpCas9 and gRNA829_ABE8.8_SpCas9 were identified to exhibit appreciable editing at C3 R748, which comprises part of the cleavage site recognized by C3 convertase. To assess potency for each of these base editor systems, each of the six base editor systems was transfected into HepG2 cells in a 1:4 serial dilution series from 300 ng to 0.02 ng total base-editing dose (2:1 editor to sgRNA ratio), where “total base-editing dose” indicates the combined mass of the guide polynucleotide and the mRNA encoding the base editor. Non-translating ABE8.8-encoding mRNA was used to normalize all wells to a 300-400 ng total RNA dose. The base editor systems sgRNA_088_ABE8.8_SpCas9 and gRNA676_ABE8.8_SpCas9, which targets a splice site for base editing, were used as positive editing controls and as benchmarks for editing performance. All conditions were evaluated in triplicate. Genomic DNA was harvested from cells 3 days post-transfection and editing efficiency was assessed by next-generation sequencing (NGS). Data was fit to a variable slope (four parameter) curve, and EC50s were calculated for all base editor systems.

[0468] On-target editing data for all conditions fit well to a variable slope (four parameter) curve, with R² values approximately 0.99 or greater for all base editor systems (FIG. 41). Relative performance between the base editor systems evaluated in HepG2 cells was consistent with base editing observed in Hek293T cells (FIG. 41).

[0469] The following methods were employed in the above examples.

### Hek293T and HepG2 Cell Maintenance

[0470] Hek293T cells (ATCC, CRL-3216) were cultured according to the manufacturer's protocols and split at least every four days. Cells were cultured in 1×DMEM+GlutaMAX (Thermo Fisher Scientific, 10566016) supplemented with 10% Fetal Bovine Serum (Thermo Fisher, A3160401).

[0471] HepG2 cells (ATCC, HB-8065) were cultured according to the manufacturer's protocols and split at least every four days. Cells were cultured in 1×MEM (Thermo Fisher Scientific, 11095080) supplemented with 10% Fetal Bovine Serum (Thermo Fisher, A3160401).

### PXB-Cell Maintenance

[0472] A 24-well plate of PXB-cell hepatocytes was ordered from PhoenixBio. After receipt of cells, media was changed twice with pre-warmed dHCGM media (PhoenixBio)+10% Fetal Bovine Serum (Thermo Fisher, A3160401). Cells were then incubated according to the manufacturer's instructions, changing the media every 3 days. An extra media change was performed the day following transfection, after which a 3-day media change schedule was resumed. For all media changes other than the two initial changes and the day following transfection, media was collected, distributed across multiple 96-well plates, and stored at −80° C.

### Primary Cyno Hepatocyte (PCH) Monolayer Plating

[0473] A frozen vial of primary cyno hepatocytes (IVAL, A75245, Lot #10286011) was thawed and mixed with 50 mL pre-warmed cryopreserved hepatocyte recovery medium (CHRM) medium (Invitrogen, CM7000). The vial was centrifuged at 100×g for 10 minutes at room temperature. CHRM media was discarded, and the cell pellet was resuspended in 4 mL INVITROGRO CP Medium (Bio IVT, Z990003; a medium that contains serum and is suitable as a medium for cryoplateable (CP) hepatocytes)+2.2% Torpedo Antibiotic Mix (Bio IVT, Z99000). Cells were counted using a Neubauer Improved hemocytometer (SKC, Inc., DHCN015) and 350,000 cells/well were plated in a 24-well BioCoat Rat Collagen I plate (Corning, 354408).

### PHH/PCH Co-Culture Generation and Maintenance

[0474] Cryopreserved primary human hepatocytes (BioIVT, F00995-P, JCG and MRW donors) were plated using the same protocol as that used for PCH monolayer generation (see above). CP+Torpedo medium was changed approximately 5 hours after plating. Co-cultures were generated one day following plating through the addition of 20,000 3T3-J2 cells (Stem Cell Technologies, 100-0353) to each well. Following a media change the next day, cells were incubated according to the manufacturer's instructions, changing CP+Torpedo media every 3 days. An extra media change was performed the day following transfection, after which a 3-day media change schedule was resumed. For all media changes other than those following plating, 3T3-J2 cell addition, and transfection, media was collected, distributed across multiple 96-well plates, and stored at −80° C.

[0475] For the generation of primary cyno hepatocyte (IVAL, A75245, Lot #10286011) co-cultures, 3T3-J2 cells were added approximately 5 hours after plating. Otherwise, the same protocol was followed as that used for PHH co-cultures.

### Cell Transfection

[0476] Hek293T cells were transfected at least one week after cells were thawed. One day prior to transfection, cells were plated on PDL 48-well plates (Corning, 354509), with 25,000-35,000 cells per well. For each condition, 200 ng sgRNA (Agilent, Synthego, and IDT) and 600 ng editor mRNA (produced at Beam) were diluted to 12.5 μl with OPTIMEM (Thermo Fisher, 31985062) in a 96-well plate. Separately, lipofectamine MessengerMAX Reagent (Thermo Fisher, LMRNA015) at 1.5× the total volume of RNA was diluted in OPTIMEM to 12.5 μl for each condition, mixed thoroughly, and incubated at room temperature for 10 minutes. MessengerMAX solutions were then combined with the corresponding sgRNA+editor solution and thoroughly mixed. Following a 5-minute incubation at room temperature, the lipid encapsulated mRNA+sgRNA mixes were added dropwise onto the PXB-cells. Media was changed and spent media was discarded the day following transfection.

[0477] PXB-cells were transfected 3 days following their receipt. Prior to transfection, a media change was performed for all wells. Spent media was aliquoted across multiple 96 well plates and stored at −80° C. For each condition, 200 ng sgRNA (Agilent and Synthego) and 600 ng editor mRNA (produced at Beam) were diluted to 25 μl with OPTIMEM (Thermo Fisher, 31985062) in a 96-well plate. Separately, the transfection reagent lipofectamine MessengerMAX Reagent (Thermo Fisher, LMRNA015) at 1.5× the total volume of RNA mixture was diluted in OPTIMEM to 25 μl for each condition, mixed thoroughly, and incubated at room temperature for 10 minutes. MessengerMAX solutions were then combined with the corresponding sgRNA+editor solution and thoroughly mixed. Following a 5-minute incubation at room temperature, the lipid encapsulated mRNA+sgRNA mixes were added dropwise onto the PXB-cells. Media was changed and spent media was discarded <16 hours following transfection.

[0478] Primary human hepatocyte (PHH) and Primary cyno hepatocyte (PCH) co-cultures were transfected at least 4 days following the addition of 3T3-J2 feeder cells. Prior to transfection, a media change was performed for all wells. The same transfection protocol as that used for hepatocytes extracted from humanized mouse livers (PXB-cells) was used for PHH and PCH co-cultures.

[0479] PHH and PCH monolayers were transfected approximately 5 hours following plating. Prior to transfection, a media change was performed for all wells. The same transfection protocol as that used for PXB-cells was used. For some PCH and PHH monolayer experiments, dose titrations and sub-saturating base-editing doses were transfected. In these cases, Universal Human Reference RNA (Life Technologies, QS0639) or a non-translating ABE8.8-encoding mRNA was used to normalize total RNA levels to 300-1000 ng.

[0480] HepG2 cells were transfected at least one week after cells were thawed. One day prior to transfection, cells were plated on PDL 48-well plates (Corning, 354509) or CellBIND 96-well plates (Millipore Sigma, CLS3603), with 30,000 cells per well seeded for 48-well plates and 12,000 cells per well seeded for 96-well plates. Transfections were performed as for Hek293T cells, but with no 10-minute incubation of the MessengerMax solution, and with a 10-minute incubation at room temperature of the encapsulated mRNA+sgRNA solutions prior to dropwise addition to the cells. No media change was performed the day after transfection. For some HepG2 experiments, dose titrations and sub-saturating base-editing doses were transfected. In these cases, Universal Human Reference RNA (Life Technologies, QS0639) or a non-translating ABE8.8 mRNA was used to normalize total RNA levels to 300-400 ng total RNA.

### Next Generation DNA Sequencing (NGS) and Genomic DNA Extraction

[0481] Following media collection, genomic DNA was isolated from each PXB-cell well 13-days or 16-days post-transfection according to the following protocol. 200 μl of QuickExtract DNA Extraction Solution (Lucigen, QE09050) was added to each well. Cells were incubated for 5 minutes at 37° C., after which the cells were manually dislodged from the bottom of each well by pipetting. The cells were incubated again for 5 minutes at 37° C., after which the buffer-cell mixture was thoroughly mixed, and 150 μl was transferred to a 96-well plate. The 96-well plate was incubated at 65° C. for 15 mins and then at 98° C. for 10 mins.

[0482] PCR was performed using Phusion U Green Multiplex PCR Master Mix (Fisher Scientific, F564L) and region-specific primers. A second round of PCR was then performed on the first round PCR products to add barcoded Illumina adaptor sequences to each sample. Second round PCR products were purified using SPRIselect beads (Thermo Fisher Scientific, B23317) at a 1:1 bead to PCR ratio. The combined library concentration was quantified using a Qubit 1×dsDNA HS Assay Kit (Thermo Fisher Scientific, Q33231), and the library was sequenced using a Miseq Reagent Kit v2 (300-cycles) (Illumina). Reads were aligned to appropriate reference sequences and editing efficiency was assessed at the appropriate sites.

[0483] Genomic DNA isolation, NGS, and analysis were performed as above for (1) primary cyno hepatocyte and primary human hepatocyte co-cultures, with DNA extraction taking place 13-days post-transfection; (2) Hek293T and HepG2 cultures, with DNA extraction taking place 3-days post-transfection, and only 50-100 ul QE buffer being used for extraction; and 3) primary cyno hepatocyte and primary human hepatocyte monolayers, with DNA extraction taking place 3-days post-transfection.

### C3 Protein Quantification

[0484] A human C3 ELISA kit (Abcam, ab108823) was used to measure C3 protein levels in PXB-cell and PHH co-culture supernatants at various timepoints pre- and post-transfection for assessment of guide polynucleotides targeting the C3 start codon for base editing. PXB-cell and PHH co-culture supernatants were thawed at room temperature and centrifuged for 2000×g for 10 minutes at 4° C. Supernatants were then diluted 1:1000 in provided Sample Diluent NS buffer prior to loading on the ELISA plate. The ELISA assay was then performed according to manufacturer's instructions. Samples were allowed to develop for 20 minutes in Development solution prior to addition of Stop solution. Absorbance was read at 450 nm using an Infinite M Plex plate reader (Tecan).

[0485] A human C3 meso scale discovery (MSD) assay kit (MesoScale, K151XYR-2) was used to measure human C3 protein levels in FRG liver-humanized mouse serum, as well as in the supernatants of PHH co-cultures administered base editor systems targeting the C3 start codon or TATA box for base editing. Thawed FRG liver-humanized mouse serum samples were diluted 1:1000, and thawed PHH co-culture supernatants were diluted 1:100, in provided Diluent 100 (MesoScale, R50AA) buffer prior to loading on a MSD GOLD small spot streptavidin plate coated with biotinylated capture antibody. The MSD assay was then performed according to manufacturer's instructions. Raw counts were taken using a MESO QuickPlex SQ 120 instrument (MesoScale, A10AA-0).

[0486] For the detection of cynomolgous monkey C3 protein in primary cyno hepatocyte co-culture supernatants, known concentrations of purified cyno C3 protein (CompTech, CY113) were used to assess cross reactivity of the human C3 ELISA kit (Abcam, ab108823). Through this approach, it was determined that the kit was approximately 30% cross-reactive with cyno C3 protein. Purified cyno C3 protein was then used to generate a new set of standards (124 ng/mL—2.09 ng/mL for standards 1-7) capable of accurately measuring cyno C3 protein levels. The assay was otherwise performed identically to manufacturer's instructions. Supernatants were diluted 1:100 and were developed for 22 minutes in Development solution prior to addition of Stop solution.

RNA Extraction from FRG Liver-Humanized Mouse Liver and Quantification of C3 RNA by RT-qPCR

[0487] Total RNA was extracted from FRG liver-humanized mouse liver fragments frozen in RNAlater using a RNeasy Plus Kit (Qiagen). The liver fragments were first thawed on ice and the RNAlater was removed. Livers were dried, weighed, and cut into 2-6 pieces with a scalpel. Liver pieces were transferred to prechilled 1 mL RLT-buffer (Qiagen)+1% B-mercaptoethanol in prefilled zirconium bead tubes (Benchmark Scientific, D1032-15), taking care to transfer no more than 70 mg liver pieces to prevent overloading. A BeadBug 6 Bead Homogenizer (Benchmark Scientific) was used to homogenize the tissue by performing two rounds of two 30 second cycles each at a speed of 4350 and chilling samples on ice between rounds of homogenization. Samples were spun down using a centrifuge at max speed for 3 minutes. The RNeasy Plus Kit was then used for RNA purification of 500 μl of lysate according to manufacturer's instructions. RNA was eluted in 40 μl water.

[0488] Four FAM-MGB TaqMan RT-qPCR probes that bind exon-exon junctions across the length of the C3 gene (Hs01100912_m1 [Exon 4-5], Hs00163811_m1 [Exon 19-20], Hs01100896_m1 [Exon 27-28], and Hs01100908_m1 [Exon 38-39]; Thermo Fisher) were used to measure C3 mRNA levels in RNA extracted from FRG liver-humanized mouse livers. All probes were run in multiplex with the VIC_MGB housekeeping probe GAPDH (Hs02786624_g1, Thermo Fisher). TaqPath 1-Step Multiplex Master Mix (Thermo Fisher, A28525) was combined with probes and 2 ng RNA in 10 μL reactions that were loaded into a reaction plate (Thermo Fisher, 4483285). All conditions were run in duplicate. The plate was covered with an optical adhesive, and RT-qPCR was run on a QuantStudio 6 Flex RT-qPCR system (Thermo Fisher). Mustang purple was used as a passive reference dye. The following Fast 384 protocol was used: UNG incubation—1 cycle: 25° C. for 2 minutes, Reverse Transcription—1 cycle: 53° C. for 10 minutes, polymerase activation—1 cycle: 95° C. for 2 minutes, Amplification—40 cycles: 95° C. for 3 seconds and 60° C. for 30 seconds.

### LNP Formulation

[0489] LNP formulation of Lipid and RNA solutions for use in FRG liver-humanized mice studies was performed on a benchtop NanoAssemblr (Precision Nanosystems). A lipid stream flow rate of 3 mL/min and RNA stream flow rate of 9 mL/min was used, with a flow rate ratio of 3:1 (RNA to Lipid stream). Dialysis was performed on the formulated LNP using a SLIDE-A-LYZER G2 20K cassette (Thermo Scientific). LNP was first dialyzed against at least 100× excess of dialysis buffer for 2-4 hours at 4° C. Dialysis buffer was changed, and the LNP was dialyzed again between 2-16 hours at 4° C. LNP was removed form the dialysis cassette, loaded onto a Amicon Ultra—100 KD centrifugation filter (Millipore Sigma), and spun at 2000×g (timing of spin empirically determined from starting concentration and desired final concentration).

### Engineered Hek293T Cell Generation

[0490] BxB1 integrase was used to insert a construct containing the protospacer and PAM sequences targeted by the human gRNA2202 guide polynucleotide and by the cynomolgous monkey gRNA2200 guide polynucleotide, each separated by 50 bp, into a GFP-expressing Hek293T monoclonal cell line with a single copy of the BxB1 landing pad. Successful integration conferred blasticidin resistance and a shift from GFP to mCherry expression. Blasticidin selection was performed for two weeks, with blasticidin concentration gradually increasing from 10 μg/mL to 20 μg/mL. Successful selection for stably integrated cells was monitored by flow cytometry.

### OTHER EMBODIMENTS

[0491] From the foregoing description, it will be apparent that variations and modifications may be made to the aspects or embodiments described herein to adopt it to various usages and conditions. Such embodiments are also within the scope of the following claims.

[0492] The recitation of a listing of elements in any definition of a variable herein includes definitions of that variable as any single element or combination (or subcombination) of listed elements. The recitation of an embodiment herein includes that embodiment as any single embodiment or in combination with any other embodiments or portions thereof.

[0493] All patents and publications mentioned in this specification are herein incorporated by reference to the same extent as if each independent patent and publication was specifically and individually indicated to be incorporated by reference.

The application's sequence listing, which the Patent Office published only in electronic form, follows.

SEQUENCE LISTING (944 sequences)

SEQ ID NO: 1 - protein, 167 aa, Escherichia coli
  REGION 1..167: note = misc_feature - TadA*7.10 (ecTadA) polypeptide sequence
MSEVEFSHEYWMRHALTLAKRARDEREVPVGAVLVLNNRVIGEGWNRAIGLHDPTAHAEIMALRQGGLVMQNYRLIDATLYVTFEPCVMCAGAMIHSRIGRVVFGVRNAKTGAAGSLMDVLHYPGMNHRVEITEGILADECAALLCYFFRMPRQVFNAQKKAQSSTD

SEQ ID NO: 2 - DNA, 4092 bp, synthetic construct
  misc_feature 1..4092: note = BhCas12b GGSGGS-ABE8-Xten20at P153 polynucleotide sequence
  misc_feature 1..6: note = Kozak sequence
  misc_feature 7..57: note = Sequence encoding N-terminal nuclear localization signal
  misc_feature 58..513: note = Sequence encoding BhCas12b
  misc_feature 514..531: note = Sequence encoding a linker
  misc_feature 532..1029: note = Sequence encoding TadA*8
  misc_feature 1030..1089: note = Sequence encoding Xten20 linker
  misc_feature 1090..3954: note = Sequence encoding BhCas12b
  misc_feature 3955..4002: note = Sequence encoding C-terminal NLS
  misc_feature 4003..4008: note = Sequence encoding GS linker
  misc_feature 4009..4089: note = Sequence encoding 3x hemagglutinin (HA) tag
  source 1..4092: mol_type = other DNA
gccaccatggccccaaagaagaagcggaaggtcggtatccacggagtcccagcagccgccaccagatccttcatcctgaagatcgagcccaacgaggaagtgaagaaaggcctctggaaaacccacgaggtgctgaaccacggaatcgcctactacatgaatatcctgaagctgatccggcaagaggccatctacgagcaccacgagcaggaccccaagaatcccaagaaggtgtccaaggccgagatccaggccgagctgtgggatttcgtgctgaagatgcagaagtgcaacagcttcacacacgaggtggacaaggacgaggtgttcaacatcctgagagagctgtacgaggaactggtgcccagcagcgtggaaaagaagggcgaagccaaccagctgagcaacaagtttctgtaccctctggtggaccccaacagccagtctggaaagggaacagccagcagcggcagaaagcccagatggtacaacctgaagattgccggcgatcccggaggctctggaggaagctccgaagtcgagttttcccatgagtactggatgagacacgcattgactctcgcaaagagggctcgagatgaacgcgaggtgcccgtgggggcagtactcgtgctcaacaatcgcgtaatcggcgaaggttggaatagggcaatcggactccacgaccccactgcacatgcggaaatcatggcccttcgacagggagggcttgtgatgcagaattatcgactttatgatgcgacgctgtacgtcacgtttgaaccttgcgtaatgtgcgcgggagctatgattcactcccgcattggacgagttgtattcggtgttcgcaacgccaagacgggtgccgcaggttcactgatggacgtgctgcatcatccaggcatgaaccaccgggtagaaatcacagaaggcatattggcggacgaatgtgcggcgctgttgtgtcgtttttttcgcatgcccaggcgggtctttaacgcccagaaaaaagcacaatcctctactgacggctcttctggatctgaaacacctggcacaagcgagagcgccacccctgagagctctggctcctgggaagaagagaagaagaagtgggaagaagataagaaaaaggacccgctggccaagatcctgggcaagctggctgagtacggactgatccctctgttcatcccctacaccgacagcaacgagcccatcgtgaaagaaatcaagtggatggaaaagtcccggaaccagagcgtgcggcggctggataaggacatgttcattcaggccctggaacggttcctgagctgggagagctggaacctgaaagtgaaagaggaatacgagaaggtcgagaaagagtacaagaccctggaagagaggatcaaagaggacatccaggctctgaaggctctggaacagtatgagaaagagcggcaagaacagctgctgcgggacaccctgaacaccaacgagtaccggctgagcaagagaggccttagaggctggcgggaaatcatccagaaatggctgaaaatggacgagaacgagccctccgagaagtacctggaagtgttcaaggactaccagcggaagcaccctagagaggccggcgattacagcgtgtacgagttcctgtccaagaaagagaaccacttcatctggcggaatcaccctgagtacccctacctgtacgccaccttctgcgagatcgacaagaaaaagaaggacgccaagcagcaggccaccttcacactggccgatcctatcaatcaccctctgtgggtccgattcgaggaaagaagcggcagcaacctgaacaagtacagaatcctgaccgagcagctgcacaccgagaagctgaagaaaaagctgacagtgcagctggaccggctgatctaccctacagaatctggcggctgggaagagaagggcaaagtggacattgtgctgctgcccagccggcagttctacaaccagatcttcctggacatcgaggaaaagggcaagcacgccttcacctacaaggatgagagcatcaagttccctctgaagggcacactcggcggagccagagtgcagttcgacagagatcacctgagaagataccctcacaaggtggaaagcggcaacgtgggcagaatctacttcaacatgaccgtgaacatcgagcctacagagtccccagtgtccaagtctctgaagatccaccgggacgacttccccaaggtggtcaacttcaagcccaaagaactgaccgagtggatcaaggacagcaagggcaagaaactgaagtccggcatcgagtccctggaaatcggcctgagagtgatgagcatcgacctgggacagagacaggccgctgccgcctctattttcgaggtggtggatcagaagcccgacatcgaaggcaagctgtttttcccaatcaagggcaccgagctgtatgccgtgcacagagccagcttcaacatcaagctgcccggcgagacactggtcaagagcagagaagtgctgcggaaggccagagaggacaatctgaaactgatgaaccagaagctcaacttcctgcggaacgtgctgcacttccagcagttcgaggacatcaccgagagagagaagcgggtcaccaagtggatcagcagacaagagaacagcgacgtgcccctggtgtaccaggatgagctgatccagatccgcgagctgatgtacaagccttacaaggactgggtcgccttcctgaagcagctccacaagagactggaagtcgagatcggcaaagaagtgaagcactggcggaagtccctgagcgacggaagaaagggcctgtacggcatctccctgaagaacatcgacgagatcgatcggacccggaagttcctgctgagatggtccctgaggcctaccgaacctggcgaagtgcgtagactggaacccggccagagattcgccatcgaccagctgaatcacctgaacgccctgaaagaagatcggctgaagaagatggccaacaccatcatcatgcacgccctgggctactgctacgacgtgcggaagaagaaatggcaggctaagaaccccgcctgccagatcatcctgttcgaggatctgagcaactacaacccctacgaggaaaggtcccgcttcgagaacagcaagctcatgaagtggtccagacgcgagatccccagacaggttgcactgcagggcgagatctatggcctgcaagtgggagaagtgggcgctcagttcagcagcagattccacgccaagacaggcagccctggcatcagatgtagcgtcgtgaccaaagagaagctgcaggacaatcggttcttcaagaatctgcagagagagggcagactgaccctggacaaaatcgccgtgctgaaagagggcgatctgtacccagacaaaggcggcgagaagttcatcagcctgagcaaggatcggaagtgcgtgaccacacacgccgacatcaacgccgctcagaacctgcagaagcggttctggacaagaacccacggcttctacaaggtgtactgcaaggcctaccaggtggacggccagaccgtgtacatccctgagagcaaggaccagaagcagaagatcatcgaagagttcggcgagggctacttcattctgaaggacggggtgtacgaatgggtcaacgccggcaagctgaaaatcaagaagggcagctccaagcagagcagcagcgagctggtggatagcgacatcctgaaagacagcttcgacctggcctccgagctgaaaggcgaaaagctgatgctgtacagggaccccagcggcaatgtgttccccagcgacaaatggatggccgctggcgtgttcttcggaaagctggaacgcatcctgatcagcaagctgaccaaccagtactccatcagcaccatcgaggacgacagcagcaagcagtctatgaaaaggccggcggccacgaaaaaggccggccaggcaaaaaagaaaaagggatcctacccatacgatgttccagattacgcttatccctacgacgtgcctgattatgcatacccatatgatgtccccgactatgcctaa

SEQ ID NO: 3 - protein, 1361 aa, synthetic construct
  REGION 1..1361: note = BhCas12b GGSGGS-ABE8-Xten20at P153 polypeptide sequence
MAPKKKRKVGIHGVPAAATRSFILKIEPNEEVKKGLWKTHEVLNHGIAYYMNILKLIRQEAIYEHHEQDPKNPKKVSKAEIQAELWDFVLKMQKCNSFTHEVDKDEVFNILRELYEELVPSSVEKKGEANQLSNKFLYPLVDPNSQSGKGTASSGRKPRWYNLKIAGDPGGSGGSSEVEFSHEYWMRHALTLAKRARDEREVPVGAVLVLNNRVIGEGWNRAIGLHDPTAHAEIMALRQGGLVMQNYRLYDATLYVTFEPCVMCAGAMIHSRIGRVVFGVRNAKTGAAGSLMDVLHHPGMNHRVEITEGILADECAALLCRFFRMPRRVFNAQKKAQSSTDGSSGSETPGTSESATPESSGSWEEEKKKWEEDKKKDPLAKILGKLAEYGLIPLFIPYTDSNEPIVKEIKWMEKSRNQSVRRLDKDMFIQALERFLSWESWNLKVKEEYEKVEKEYKTLEERIKEDIQALKALEQYEKERQEQLLRDTLNTNEYRLSKRGLRGWREIIQKWLKMDENEPSEKYLEVFKDYQRKHPREAGDYSVYEFLSKKENHFIWRNHPEYPYLYATFCEIDKKKKDAKQQATFTLADPINHPLWVRFEERSGSNLNKYRILTEQLHTEKLKKKLTVQLDRLIYPTESGGWEEKGKVDIVLLPSRQFYNQIFLDIEEKGKHAFTYKDESIKFPLKGTLGGARVQFDRDHLRRYPHKVESGNVGRIYFNMTVNIEPTESPVSKSLKIHRDDFPKVVNFKPKELTEWIKDSKGKKLKSGIESLEIGLRVMSIDLGQRQAAAASIFEVVDQKPDIEGKLFFPIKGTELYAVHRASFNIKLPGETLVKSREVLRKAREDNLKLMNQKLNFLRNVLHFQQFEDITEREKRVTKWISRQENSDVPLVYQDELIQIRELMYKPYKDWVAFLKQLHKRLEVEIGKEVKHWRKSLSDGRKGLYGISLKNIDEIDRTRKFLLRWSLRPTEPGEVRRLEPGQRFAIDQLNHLNALKEDRLKKMANTIIMHALGYCYDVRKKKWQAKNPACQIILFEDLSNYNPYEERSRFENSKLMKWSRREIPRQVALQGEIYGLQVGEVGAQFSSRFHAKTGSPGIRCSVVTKEKLQDNRFFKNLQREGRLTLDKIAVLKEGDLYPDKGGEKFISLSKDRKCVTTHADINAAQNLQKRFWTRTHGFYKVYCKAYQVDGQTVYIPESKDQKQKIIEEFGEGYFILKDGVYEWVNAGKLKIKKGSSKQSSSELVDSDILKDSFDLASELKGEKLMLYRDPSGNVFPSDKWMAAGVFFGKLERILISKLTNQYSISTIEDDSSKQSMKRPAATKKAGQAKKKKGSYPYDVPDYAYPYDVPDYAYPYDVPDYA

SEQ ID NO: 4 - DNA, 4092 bp, synthetic construct
  misc_feature 1..4092: note = BhCas12b GGSGGS-ABE8-Xten20at K255 polynucleotide sequence
  misc_feature 1..6: note = Kozak sequence
  misc_feature 7..57: note = Sequence encoding N-terminal nuclear localization signal (NLS)
  misc_feature 58..822: note = Sequence encoding BhCas12b
  misc_feature 823..840: note = Sequence encoding a linker
  misc_feature 841..1338: note = Sequence encoding TadA*8
  misc_feature 1339..1398: note = Sequence encoding Xten20 linker
  misc_feature 1399..3954: note = Sequence encoding BhCas12b
  misc_feature 3955..4002: note = Sequence encoding C-terminal NLS
  misc_feature 4003..4008: note = Sequence encoding a GS linker
  misc_feature 4009..4089: note = Sequence encoding 3x hemagglutinin (HA) tag
  source 1..4092: mol_type = other DNA
gccaccatggccccaaagaagaagcggaaggtcggtatccacggagtcccagcagccgccaccagatccttcatcctgaagatcgagcccaacgaggaagtgaagaaaggcctctggaaaacccacgaggtgctgaaccacggaatcgcctactacatgaatatcctgaagctgatccggcaagaggccatctacgagcaccacgagcaggaccccaagaatcccaagaaggtgtccaaggccgagatccaggccgagctgtgggatttcgtgctgaagatgcagaagtgcaacagcttcacacacgaggtggacaaggacgaggtgttcaacatcctgagagagctgtacgaggaactggtgcccagcagcgtggaaaagaagggcgaagccaaccagctgagcaacaagtttctgtaccctctggtggaccccaacagccagtctggaaagggaacagccagcagcggcagaaagcccagatggtacaacctgaagattgccggcgatccctcctgggaagaagagaagaagaagtgggaagaagataagaaaaaggacccgctggccaagatcctgggcaagctggctgagtacggactgatccctctgttcatcccctacaccgacagcaacgagcccatcgtgaaagaaatcaagtggatggaaaagtcccggaaccagagcgtgcggcggctggataaggacatgttcattcaggccctggaacggttcctgagctgggagagctggaacctgaaagtgaaagaggaatacgagaaggtcgagaaagagtacaagaccctggaagagaggatcaaaggaggctctggaggaagctccgaagtcgagttttcccatgagtactggatgagacacgcattgactctcgcaaagagggctcgagatgaacgcgaggtgcccgtgggggcagtactcgtgctcaacaatcgcgtaatcggcgaaggttggaatagggcaatcggactccacgaccccactgcacatgcggaaatcatggcccttcgacagggagggcttgtgatgcagaattatcgactttatgatgcgacgctgtacgtcacgtttgaaccttgcgtaatgtgcgcgggagctatgattcactcccgcattggacgagttgtattcggtgttcgcaacgccaagacgggtgccgcaggttcactgatggacgtgctgcatcatccaggcatgaaccaccgggtagaaatcacagaaggcatattggcggacgaatgtgcggcgctgttgtgtcgtttttttcgcatgcccaggcgggtctttaacgcccagaaaaaagcacaatcctctactgacggctcttctggatctgaaacacctggcacaagcgagagcgccacccctgagagctctggcgaggacatccaggctctgaaggctctggaacagtatgagaaagagcggcaagaacagctgctgcgggacaccctgaacaccaacgagtaccggctgagcaagagaggccttagaggctggcgggaaatcatccagaaatggctgaaaatggacgagaacgagccctccgagaagtacctggaagtgttcaaggactaccagcggaagcaccctagagaggccggcgattacagcgtgtacgagttcctgtccaagaaagagaaccacttcatctggcggaatcaccctgagtacccctacctgtacgccaccttctgcgagatcgacaagaaaaagaaggacgccaagcagcaggccaccttcacactggccgatcctatcaatcaccctctgtgggtccgattcgaggaaagaagcggcagcaacctgaacaagtacagaatcctgaccgagcagctgcacaccgagaagctgaagaaaaagctgacagtgcagctggaccggctgatctaccctacagaatctggcggctgggaagagaagggcaaagtggacattgtgctgctgcccagccggcagttctacaaccagatcttcctggacatcgaggaaaagggcaagcacgccttcacctacaaggatgagagcatcaagttccctctgaagggcacactcggcggagccagagtgcagttcgacagagatcacctgagaagataccctcacaaggtggaaagcggcaacgtgggcagaatctacttcaacatgaccgtgaacatcgagcctacagagtccccagtgtccaagtctctgaagatccaccgggacgacttccccaaggtggtcaacttcaagcccaaagaactgaccgagtggatcaaggacagcaagggcaagaaactgaagtccggcatcgagtccctggaaatcggcctgagagtgatgagcatcgacctgggacagagacaggccgctgccgcctctattttcgaggtggtggatcagaagcccgacatcgaaggcaagctgtttttcccaatcaagggcaccgagctgtatgccgtgcacagagccagcttcaacatcaagctgcccggcgagacactggtcaagagcagagaagtgctgcggaaggccagagaggacaatctgaaactgatgaaccagaagctcaacttcctgcggaacgtgctgcacttccagcagttcgaggacatcaccgagagagagaagcgggtcaccaagtggatcagcagacaagagaacagcgacgtgcccctggtgtaccaggatgagctgatccagatccgcgagctgatgtacaagccttacaaggactgggtcgccttcctgaagcagctccacaagagactggaagtcgagatcggcaaagaagtgaagcactggcggaagtccctgagcgacggaagaaagggcctgtacggcatctccctgaagaacatcgacgagatcgatcggacccggaagttcctgctgagatggtccctgaggcctaccgaacctggcgaagtgcgtagactggaacccggccagagattcgccatcgaccagctgaatcacctgaacgccctgaaagaagatcggctgaagaagatggccaacaccatcatcatgcacgccctgggctactgctacgacgtgcggaagaagaaatggcaggctaagaaccccgcctgccagatcatcctgttcgaggatctgagcaactacaacccctacgaggaaaggtcccgcttcgagaacagcaagctcatgaagtggtccagacgcgagatccccagacaggttgcactgcagggcgagatctatggcctgcaagtgggagaagtgggcgctcagttcagcagcagattccacgccaagacaggcagccctggcatcagatgtagcgtcgtgaccaaagagaagctgcaggacaatcggttcttcaagaatctgcagagagagggcagactgaccctggacaaaatcgccgtgctgaaagagggcgatctgtacccagacaaaggcggcgagaagttcatcagcctgagcaaggatcggaagtgcgtgaccacacacgccgacatcaacgccgctcagaacctgcagaagcggttctggacaagaacccacggcttctacaaggtgtactgcaaggcctaccaggtggacggccagaccgtgtacatccctgagagcaaggaccagaagcagaagatcatcgaagagttcggcgagggctacttcattctgaaggacggggtgtacgaatgggtcaacgccggcaagctgaaaatcaagaagggcagctccaagcagagcagcagcgagctggtggatagcgacatcctgaaagacagcttcgacctggcctccgagctgaaaggcgaaaagctgatgctgtacagggaccccagcggcaatgtgttccccagcgacaaatggatggccgctggcgtgttcttcggaaagctggaacgcatcctgatcagcaagctgaccaaccagtactccatcagcaccatcgaggacgacagcagcaagcagtctatgaaaaggccggcggccacgaaaaaggccggccaggcaaaaaagaaaaagggatcctacccatacgatgttccagattacgcttatccctacgacgtgcctgattatgcatacccatatgatgtccccgactatgcctaa

SEQ ID NO: 5 - protein, 1361 aa, synthetic construct
  REGION 1..1361: note = BhCas12b GGSGGS-ABE8-Xten20at K255 polypeptide sequence
MAPKKKRKVGIHGVPAAATRSFILKIEPNEEVKKGLWKTHEVLNHGIAYYMNILKLIRQEAIYEHHEQDPKNPKKVSKAEIQAELWDFVLKMQKCNSFTHEVDKDEVFNILRELYEELVPSSVEKKGEANQLSNKFLYPLVDPNSQSGKGTASSGRKPRWYNLKIAGDPSWEEEKKKWEEDKKKDPLAKILGKLAEYGLIPLFIPYTDSNEPIVKEIKWMEKSRNQSVRRLDKDMFIQALERFLSWESWNLKVKEEYEKVEKEYKTLEERIKGGSGGSSEVEFSHEYWMRHALTLAKRARDEREVPVGAVLVLNNRVIGEGWNRAIGLHDPTAHAEIMALRQGGLVMQNYRLYDATLYVTFEPCVMCAGAMIHSRIGRVVFGVRNAKTGAAGSLMDVLHHPGMNHRVEITEGILADECAALLCRFFRMPRRVFNAQKKAQSSTDGSSGSETPGTSESATPESSGEDIQALKALEQYEKERQEQLLRDTLNTNEYRLSKRGLRGWREIIQKWLKMDENEPSEKYLEVFKDYQRKHPREAGDYSVYEFLSKKENHFIWRNHPEYPYLYATFCEIDKKKKDAKQQATFTLADPINHPLWVRFEERSGSNLNKYRILTEQLHTEKLKKKLTVQLDRLIYPTESGGWEEKGKVDIVLLPSRQFYNQIFLDIEEKGKHAFTYKDESIKFPLKGTLGGARVQFDRDHLRRYPHKVESGNVGRIYFNMTVNIEPTESPVSKSLKIHRDDFPKVVNFKPKELTEWIKDSKGKKLKSGIESLEIGLRVMSIDLGQRQAAAASIFEVVDQKPDIEGKLFFPIKGTELYAVHRASFNIKLPGETLVKSREVLRKAREDNLKLMNQKLNFLRNVLHFQQFEDITEREKRVTKWISRQENSDVPLVYQDELIQIRELMYKPYKDWVAFLKQLHKRLEVEIGKEVKHWRKSLSDGRKGLYGISLKNIDEIDRTRKFLLRWSLRPTEPGEVRRLEPGQRFAIDQLNHLNALKEDRLKKMANTIIMHALGYCYDVRKKKWQAKNPACQIILFEDLSNYNPYEERSRFENSKLMKWSRREIPRQVALQGEIYGLQVGEVGAQFSSRFHAKTGSPGIRCSVVTKEKLQDNRFFKNLQREGRLTLDKIAVLKEGDLYPDKGGEKFISLSKDRKCVTTHADINAAQNLQKRFWTRTHGFYKVYCKAYQVDGQTVYIPESKDQKQKIIEEFGEGYFILKDGVYEWVNAGKLKIKKGSSKQSSSELVDSDILKDSFDLASELKGEKLMLYRDPSGNVFPSDKWMAAGVFFGKLERILISKLTNQYSISTIEDDSSKQSMKRPAATKKAGQAKKKKGSYPYDVPDYAYPYDVPDYAYPYDVPDYA

SEQ ID NO: 6 - DNA, 4092 bp, synthetic construct
  misc_feature 1..4092: note = BhCas12b GGSGGS-ABE8-Xten20at D306 polynucleotide sequence
  misc_feature 1..6: note = Kozak sequence
  misc_feature 7..57: note = Sequence encoding N-terminal nuclear localization signal (NLS)
  misc_feature 58..975: note = Sequence encoding BhCas12b
  misc_feature 976..993: note = Sequence encoding a linker
  misc_feature 994..1491: note = Sequence encoding TadA*8
  misc_feature 1492..1551: note = Sequence encoding Xten20 linker
  misc_feature 1552..3954: note = Sequence encoding BhCas12b
  misc_feature 3955..4002: note = Sequence encoding C-terminal NLS
  misc_feature 4003..4008: note = Sequence encoding a GS linker
  misc_feature 4009..4089: note = Sequence encoding 3x hemagglutinin (HA) tag
  source 1..4092: mol_type = other DNA
gccaccatggccccaaagaagaagcggaaggtcggtatccacggagtcccagcagccgccaccagatccttcatcctgaagatcgagcccaacgaggaagtgaagaaaggcctctggaaaacccacgaggtgctgaaccacggaatcgcctactacatgaatatcctgaagctgatccggcaagaggccatctacgagcaccacgagcaggaccccaagaatcccaagaaggtgtccaaggccgagatccaggccgagctgtgggatttcgtgctgaagatgcagaagtgcaacagcttcacacacgaggtggacaaggacgaggtgttcaacatcctgagagagctgtacgaggaactggtgcccagcagcgtggaaaagaagggcgaagccaaccagctgagcaacaagtttctgtaccctctggtggaccccaacagccagtctggaaagggaacagccagcagcggcagaaagcccagatggtacaacctgaagattgccggcgatccctcctgggaagaagagaagaagaagtgggaagaagataagaaaaaggacccgctggccaagatcctgggcaagctggctgagtacggactgatccctctgttcatcccctacaccgacagcaacgagcccatcgtgaaagaaatcaagtggatggaaaagtcccggaaccagagcgtgcggcggctggataaggacatgttcattcaggccctggaacggttcctgagctgggagagctggaacctgaaagtgaaagaggaatacgagaaggtcgagaaagagtacaagaccctggaagagaggatcaaagaggacatccaggctctgaaggctctggaacagtatgagaaagagcggcaagaacagctgctgcgggacaccctgaacaccaacgagtaccggctgagcaagagaggccttagaggctggcgggaaatcatccagaaatggctgaaaatggacggaggctctggaggaagctccgaagtcgagttttcccatgagtactggatgagacacgcattgactctcgcaaagagggctcgagatgaacgcgaggtgcccgtgggggcagtactcgtgctcaacaatcgcgtaatcggcgaaggttggaatagggcaatcggactccacgaccccactgcacatgcggaaatcatggcccttcgacagggagggcttgtgatgcagaattatcgactttatgatgcgacgctgtacgtcacgtttgaaccttgcgtaatgtgcgcgggagctatgattcactcccgcattggacgagttgtattcggtgttcgcaacgccaagacgggtgccgcaggttcactgatggacgtgctgcatcatccaggcatgaaccaccgggtagaaatcacagaaggcatattggcggacgaatgtgcggcgctgttgtgtcgtttttttcgcatgcccaggcgggtctttaacgcccagaaaaaagcacaatcctctactgacggctcttctggatctgaaacacctggcacaagcgagagcgccacccctgagagctctggcgagaacgagccctccgagaagtacctggaagtgttcaaggactaccagcggaagcaccctagagaggccggcgattacagcgtgtacgagttcctgtccaagaaagagaaccacttcatctggcggaatcaccctgagtacccctacctgtacgccaccttctgcgagatcgacaagaaaaagaaggacgccaagcagcaggccaccttcacactggccgatcctatcaatcaccctctgtgggtccgattcgaggaaagaagcggcagcaacctgaacaagtacagaatcctgaccgagcagctgcacaccgagaagctgaagaaaaagctgacagtgcagctggaccggctgatctaccctacagaatctggcggctgggaagagaagggcaaagtggacattgtgctgctgcccagccggcagttctacaaccagatcttcctggacatcgaggaaaagggcaagcacgccttcacctacaaggatgagagcatcaagttccctctgaagggcacactcggcggagccagagtgcagttcgacagagatcacctgagaagataccctcacaaggtggaaagcggcaacgtgggcagaatctacttcaacatgaccgtgaacatcgagcctacagagtccccagtgtccaagtctctgaagatccaccgggacgacttccccaaggtggtcaacttcaagcccaaagaactgaccgagtggatcaaggacagcaagggcaagaaactgaagtccggcatcgagtccctggaaatcggcctgagagtgatgagcatcgacctgggacagagacaggccgctgccgcctctattttcgaggtggtggatcagaagcccgacatcgaaggcaagctgtttttcccaatcaagggcaccgagctgtatgccgtgcacagagccagcttcaacatcaagctgcccggcgagacactggtcaagagcagagaagtgctgcggaaggccagagaggacaatctgaaactgatgaaccagaagctcaacttcctgcggaacgtgctgcacttccagcagttcgaggacatcaccgagagagagaagcgggtcaccaagtggatcagcagacaagagaacagcgacgtgcccctggtgtaccaggatgagctgatccagatccgcgagctgatgtacaagccttacaaggactgggtcgccttcctgaagcagctccacaagagactggaagtcgagatcggcaaagaagtgaagcactggcggaagtccctgagcgacggaagaaagggcctgtacggcatctccctgaagaacatcgacgagatcgatcggacccggaagttcctgctgagatggtccctgaggcctaccgaacctggcgaagtgcgtagactggaacccggccagagattcgccatcgaccagctgaatcacctgaacgccctgaaagaagatcggctgaagaagatggccaacaccatcatcatgcacgccctgggctactgctacgacgtgcggaagaagaaatggcaggctaagaaccccgcctgccagatcatcctgttcgaggatctgagcaactacaacccctacgaggaaaggtcccgcttcgagaacagcaagctcatgaagtggtccagacgcgagatccccagacaggttgcactgcagggcgagatctatggcctgcaagtgggagaagtgggcgctcagttcagcagcagattccacgccaagacaggcagccctggcatcagatgtagcgtcgtgaccaaagagaagctgcaggacaatcggttcttcaagaatctgcagagagagggcagactgaccctggacaaaatcgccgtgctgaaagagggcgatctgtacccagacaaaggcggcgagaagttcatcagcctgagcaaggatcggaagtgcgtgaccacacacgccgacatcaacgccgctcagaacctgcagaagcggttctggacaagaacccacggcttctacaaggtgtactgcaaggcctaccaggtggacggccagaccgtgtacatccctgagagcaaggaccagaagcagaagatcatcgaagagttcggcgagggctacttcattctgaaggacggggtgtacgaatgggtcaacgccggcaagctgaaaatcaagaagggcagctccaagcagagcagcagcgagctggtggatagcgacatcctgaaagacagcttcgacctggcctccgagctgaaaggcgaaaagctgatgctgtacagggaccccagcggcaatgtgttccccagcgacaaatggatggccgctggcgtgttcttcggaaagctggaacgcatcctgatcagcaagctgaccaaccagtactccatcagcaccatcgaggacgacagcagcaagcagtctatgaaaaggccggcggccacgaaaaaggccggccaggcaaaaaagaaaaagggatcctacccatacgatgttccagattacgcttatccctacgacgtgcctgattatgcatacccatatgatgtccccgactatgcctaa

SEQ ID NO: 7 - protein, 1361 aa, synthetic construct
  REGION 1..1361: note = BhCas12b GGSGGS-ABE8-Xten20at D306 polypeptide sequence
MAPKKKRKVGIHGVPAAATRSFILKIEPNEEVKKGLWKTHEVLNHGIAYYMNILKLIRQEAIYEHHEQDPKNPKKVSKAEIQAELWDFVLKMQKCNSFTHEVDKDEVFNILRELYEELVPSSVEKKGEANQLSNKFLYPLVDPNSQSGKGTASSGRKPRWYNLKIAGDPSWEEEKKKWEEDKKKDPLAKILGKLAEYGLIPLFIPYTDSNEPIVKEIKWMEKSRNQSVRRLDKDMFIQALERFLSWESWNLKVKEEYEKVEKEYKTLEERIKEDIQALKALEQYEKERQEQLLRDTLNTNEYRLSKRGLRGWREIIQKWLKMDGGSGGSSEVEFSHEYWMRHALTLAKRARDEREVPVGAVLVLNNRVIGEGWNRAIGLHDPTAHAEIMALRQGGLVMQNYRLYDATLYVTFEPCVMCAGAMIHSRIGRVVFGVRNAKTGAAGSLMDVLHHPGMNHRVEITEGILADECAALLCRFFRMPRRVFNAQKKAQSSTDGSSGSETPGTSESATPESSGENEPSEKYLEVFKDYQRKHPREAGDYSVYEFLSKKENHFIWRNHPEYPYLYATFCEIDKKKKDAKQQATFTLADPINHPLWVRFEERSGSNLNKYRILTEQLHTEKLKKKLTVQLDRLIYPTESGGWEEKGKVDIVLLPSRQFYNQIFLDIEEKGKHAFTYKDESIKFPLKGTLGGARVQFDRDHLRRYPHKVESGNVGRIYFNMTVNIEPTESPVSKSLKIHRDDFPKVVNFKPKELTEWIKDSKGKKLKSGIESLEIGLRVMSIDLGQRQAAAASIFEVVDQKPDIEGKLFFPIKGTELYAVHRASFNIKLPGETLVKSREVLRKAREDNLKLMNQKLNFLRNVLHFQQFEDITEREKRVTKWISRQENSDVPLVYQDELIQIRELMYKPYKDWVAFLKQLHKRLEVEIGKEVKHWRKSLSDGRKGLYGISLKNIDEIDRTRKFLLRWSLRPTEPGEVRRLEPGQRFAIDQLNHLNALKEDRLKKMANTIIMHALGYCYDVRKKKWQAKNPACQIILFEDLSNYNPYEERSRFENSKLMKWSRREIPRQVALQGEIYGLQVGEVGAQFSSRFHAKTGSPGIRCSVVTKEKLQDNRFFKNLQREGRLTLDKIAVLKEGDLYPDKGGEKFISLSKDRKCVTTHADINAAQNLQKRFWTRTHGFYKVYCKAYQVDGQTVYIPESKDQKQKIIEEFGEGYFILKDGVYEWVNAGKLKIKKGSSKQSSSELVDSDILKDSFDLASELKGEKLMLYRDPSGNVFPSDKWMAAGVFFGKLERILISKLTNQYSISTIEDDSSKQSMKRPAATKKAGQAKKKKGSYPYDVPDYAYPYDVPDYAYPYDVPDYA

SEQ ID NO: 8 - DNA, 4092 bp, synthetic construct
  misc_feature 1..4092: note = BhCas12b GGSGGS-ABE8-Xten20at D980 polynucleotide sequence
  misc_feature 1..6: note = Kozak sequence
  misc_feature 7..57: note = Sequence encoding N-terminal nuclear localization signal (NLS)
  misc_feature 58..2997: note = Sequence encoding BhCas12b
  misc_feature 2998..3015: note = Sequence encoding a linker
  misc_feature 3016..3513: note = Sequence encoding TadA*8
  misc_feature 3514..3573: note = Sequence encoding Xten20 linker
  misc_feature 3574..3954: note = Sequence encoding BhCas12b
  misc_feature 3955..4002: note = Sequence encoding C-terminal NLS
  misc_feature 4003..4008: note = Sequence encoding a GS linker
  misc_feature 4009..4089: note = Sequence encoding 3x hemagglutinin (HA) tag
  source 1..4092: mol_type = other DNA
gccaccatggccccaaagaagaagcggaaggtcggtatccacggagtcccagcagccgccaccagatccttcatcctgaagatcgagcccaacgaggaagtgaagaaaggcctctggaaaacccacgaggtgctgaaccacggaatcgcctactacatgaatatcctgaagctgatccggcaagaggccatctacgagcaccacgagcaggaccccaagaatcccaagaaggtgtccaaggccgagatccaggccgagctgtgggatttcgtgctgaagatgcagaagtgcaacagcttcacacacgaggtggacaaggacgaggtgttcaacatcctgagagagctgtacgaggaactggtgcccagcagcgtggaaaagaagggcgaagccaaccagctgagcaacaagtttctgtaccctctggtggaccccaacagccagtctggaaagggaacagccagcagcggcagaaagcccagatggtacaacctgaagattgccggcgatccctcctgggaagaagagaagaagaagtgggaagaagataagaaaaaggacccgctggccaagatcctgggcaagctggctgagtacggactgatccctctgttcatcccctacaccgacagcaacgagcccatcgtgaaagaaatcaagtggatggaaaagtcccggaaccagagcgtgcggcggctggataaggacatgttcattcaggccctggaacggttcctgagctgggagagctggaacctgaaagtgaaagaggaatacgagaaggtcgagaaagagtacaagaccctggaagagaggatcaaagaggacatccaggctctgaaggctctggaacagtatgagaaagagcggcaagaacagctgctgcgggacaccctgaacaccaacgagtaccggctgagcaagagaggccttagaggctggcgggaaatcatccagaaatggctgaaaatggacgagaacgagccctccgagaagtacctggaagtgttcaaggactaccagcggaagcaccctagagaggccggcgattacagcgtgtacgagttcctgtccaagaaagagaaccacttcatctggcggaatcaccctgagtacccctacctgtacgccaccttctgcgagatcgacaagaaaaagaaggacgccaagcagcaggccaccttcacactggccgatcctatcaatcaccctctgtgggtccgattcgaggaaagaagcggcagcaacctgaacaagtacagaatcctgaccgagcagctgcacaccgagaagctgaagaaaaagctgacagtgcagctggaccggctgatctaccctacagaatctggcggctgggaagagaagggcaaagtggacattgtgctgctgcccagccggcagttctacaaccagatcttcctggacatcgaggaaaagggcaagcacgccttcacctacaaggatgagagcatcaagttccctctgaagggcacactcggcggagccagagtgcagttcgacagagatcacctgagaagataccctcacaaggtggaaagcggcaacgtgggcagaatctacttcaacatgaccgtgaacatcgagcctacagagtccccagtgtccaagtctctgaagatccaccgggacgacttccccaaggtggtcaacttcaagcccaaagaactgaccgagtggatcaaggacagcaagggcaagaaactgaagtccggcatcgagtccctggaaatcggcctgagagtgatgagcatcgacctgggacagagacaggccgctgccgcctctattttcgaggtggtggatcagaagcccgacatcgaaggcaagctgtttttcccaatcaagggcaccgagctgtatgccgtgcacagagccagcttcaacatcaagctgcccggcgagacactggtcaagagcagagaagtgctgcggaaggccagagaggacaatctgaaactgatgaaccagaagctcaacttcctgcggaacgtgctgcacttccagcagttcgaggacatcaccgagagagagaagcgggtcaccaagtggatcagcagacaagagaacagcgacgtgcccctggtgtaccaggatgagctgatccagatccgcgagctgatgtacaagccttacaaggactgggtcgccttcctgaagcagctccacaagagactggaagtcgagatcggcaaagaagtgaagcactggcggaagtccctgagcgacggaagaaagggcctgtacggcatctccctgaagaacatcgacgagatcgatcggacccggaagttcctgctgagatggtccctgaggcctaccgaacctggcgaagtgcgtagactggaacccggccagagattcgccatcgaccagctgaatcacctgaacgccctgaaagaagatcggctgaagaagatggccaacaccatcatcatgcacgccctgggctactgctacgacgtgcggaagaagaaatggcaggctaagaaccccgcctgccagatcatcctgttcgaggatctgagcaactacaacccctacgaggaaaggtcccgcttcgagaacagcaagctcatgaagtggtccagacgcgagatccccagacaggttgcactgcagggcgagatctatggcctgcaagtgggagaagtgggcgctcagttcagcagcagattccacgccaagacaggcagccctggcatcagatgtagcgtcgtgaccaaagagaagctgcaggacaatcggttcttcaagaatctgcagagagagggcagactgaccctggacaaaatcgccgtgctgaaagagggcgatctgtacccagacaaaggcggcgagaagttcatcagcctgagcaaggatcggaagtgcgtgaccacacacgccgacatcaacgccgctcagaacctgcagaagcggttctggacaagaacccacggcttctacaaggtgtactgcaaggcctaccaggtggacggaggctctggaggaagctccgaagtcgagttttcccatgagtactggatgagacacgcattgactctcgcaaagagggctcgagatgaacgcgaggtgcccgtgggggcagtactcgtgctcaacaatcgcgtaatcggcgaaggttggaatagggcaatcggactccacgaccccactgcacatgcggaaatcatggcccttcgacagggagggcttgtgatgcagaattatcgactttatgatgcgacgctgtacgtcacgtttgaaccttgcgtaatgtgcgcgggagctatgattcactcccgcattggacgagttgtattcggtgttcgcaacgccaagacgggtgccgcaggttcactgatggacgtgctgcatcatccaggcatgaaccaccgggtagaaatcacagaaggcatattggcggacgaatgtgcggcgctgttgtgtcgtttttttcgcatgcccaggcgggtctttaacgcccagaaaaaagcacaatcctctactgacggctcttctggatctgaaacacctggcacaagcgagagcgccacccctgagagctctggcggccagaccgtgtacatccctgagagcaaggaccagaagcagaagatcatcgaagagttcggcgagggctacttcattctgaaggacggggtgtacgaatgggtcaacgccggcaagctgaaaatcaagaagggcagctccaagcagagcagcagcgagctggtggatagcgacatcctgaaagacagcttcgacctggcctccgagctgaaaggcgaaaagctgatgctgtacagggaccccagcggcaatgtgttccccagcgacaaatggatggccgctggcgtgttcttcggaaagctggaacgcatcctgatcagcaagctgaccaaccagtactccatcagcaccatcgaggacgacagcagcaagcagtctatgaaaaggccggcggccacgaaaaaggccggccaggcaaaaaagaaaaagggatcctacccatacgatgttccagattacgcttatccctacgacgtgcctgattatgcatacccatatgatgtccccgactatgcctaa

SEQ ID NO: 9 - protein, 1361 aa, synthetic construct
  REGION 1..1361: note = BhCas12b GGSGGS-ABE8-Xten20at D980 polypeptide sequence
MAPKKKRKVGIHGVPAAATRSFILKIEPNEEVKKGLWKTHEVLNHGIAYYMNILKLIRQEAIYEHHEQDPKNPKKVSKAEIQAELWDFVLKMQKCNSFTHEVDKDEVFNILRELYEELVPSSVEKKGEANQLSNKFLYPLVDPNSQSGKGTASSGRKPRWYNLKIAGDPSWEEEKKKWEEDKKKDPLAKILGKLAEYGLIPLFIPYTDSNEPIVKEIKWMEKSRNQSVRRLDKDMFIQALERFLSWESWNLKVKEEYEKVEKEYKTLEERIKEDIQALKALEQYEKERQEQLLRDTLNTNEYRLSKRGLRGWREIIQKWLKMDENEPSEKYLEVFKDYQRKHPREAGDYSVYEFLSKKENHFIWRNHPEYPYLYATFCEIDKKKKDAKQQATFTLADPINHPLWVRFEERSGSNLNKYRILTEQLHTEKLKKKLTVQLDRLIYPTESGGWEEKGKVDIVLLPSRQFYNQIFLDIEEKGKHAFTYKDESIKFPLKGTLGGARVQFDRDHLRRYPHKVESGNVGRIYFNMTVNIEPTESPVSKSLKIHRDDFPKVVNFKPKELTEWIKDSKGKKLKSGIESLEIGLRVMSIDLGQRQAAAASIFEVVDQKPDIEGKLFFPIKGTELYAVHRASFNIKLPGETLVKSREVLRKAREDNLKLMNQKLNFLRNVLHFQQFEDITEREKRVTKWISRQENSDVPLVYQDELIQIRELMYKPYKDWVAFLKQLHKRLEVEIGKEVKHWRKSLSDGRKGLYGISLKNIDEIDRTRKFLLRWSLRPTEPGEVRRLEPGQRFAIDQLNHLNALKEDRLKKMANTIIMHALGYCYDVRKKKWQAKNPACQIILFEDLSNYNPYEERSRFENSKLMKWSRREIPRQVALQGEIYGLQVGEVGAQFSSRFHAKTGSPGIRCSVVTKEKLQDNRFFKNLQREGRLTLDKIAVLKEGDLYPDKGGEKFISLSKDRKCVTTHADINAAQNLQKRFWTRTHGFYKVYCKAYQVDGGSGGSSEVEFSHEYWMRHALTLAKRARDEREVPVGAVLVLNNRVIGEGWNRAIGLHDPTAHAEIMALRQGGLVMQNYRLYDATLYVTFEPCVMCAGAMIHSRIGRVVFGVRNAKTGAAGSLMDVLHHPGMNHRVEITEGILADECAALLCRFFRMPRRVFNAQKKAQSSTDGSSGSETPGTSESATPESSGGQTVYIPESKDQKQKIIEEFGEGYFILKDGVYEWVNAGKLKIKKGSSKQSSSELVDSDILKDSFDLASELKGEKLMLYRDPSGNVFPSDKWMAAGVFFGKLERILISKLTNQYSISTIEDDSSKQSMKRPAATKKAGQAKKKKGSYPYDVPDYAYPYDVPDYAYPYDVPDYA

SEQ ID NO: 10 - DNA, 4092 bp, synthetic construct
  misc_feature 1..4092: note = BhCas12b GGSGGS-ABE8-Xten20at K1019 polynucleotide sequence
  misc_feature 1..6: note = Kozak sequence
  misc_feature 7..57: note = Sequence encoding N-terminal nuclear localization signal (NLS)
  misc_feature 58..3114: note = Sequence encoding BhCas12b
  misc_feature 3115..3132: note = Sequence encoding a linker
  misc_feature 3133..3630: note = Sequence encoding TadA*8
  misc_feature 3631..3690: note = Sequence encoding Xten20 linker
  misc_feature 3691..3954: note = Sequence encoding BhCas12b
  misc_feature 3955..4002: note = Sequence encoding C-terminal NLS
  misc_feature 4003..4008: note = Sequence encoding GS linker
  misc_feature 4009..4089: note = Sequence encoding 3x hemagglutinin (HA) tag
  source 1..4092: mol_type = other DNA
gccaccatggccccaaagaagaagcggaaggtcggtatccacggagtcccagcagccgccaccagatccttcatcctgaagatcgagcccaacgaggaagtgaagaaaggcctctggaaaacccacgaggtgctgaaccacggaatcgcctactacatgaatatcctgaagctgatccggcaagaggccatctacgagcaccacgagcaggaccccaagaatcccaagaaggtgtccaaggccgagatccaggccgagctgtgggatttcgtgctgaagatgcagaagtgcaacagcttcacacacgaggtggacaaggacgaggtgttcaacatcctgagagagctgtacgaggaactggtgcccagcagcgtggaaaagaagggcgaagccaaccagctgagcaacaagtttctgtaccctctggtggaccccaacagccagtctggaaagggaacagccagcagcggcagaaagcccagatggtacaacctgaagattgccggcgatccctcctgggaagaagagaagaagaagtgggaagaagataagaaaaaggacccgctggccaagatcctgggcaagctggctgagtacggactgatccctctgttcatcccctacaccgacagcaacgagcccatcgtgaaagaaatcaagtggatggaaaagtcccggaaccagagcgtgcggcggctggataaggacatgttcattcaggccctggaacggttcctgagctgggagagctggaacctgaaagtgaaagaggaatacgagaaggtcgagaaagagtacaagaccctggaagagaggatcaaagaggacatccaggctctgaaggctctggaacagtatgagaaagagcggcaagaacagctgctgcgggacaccctgaacaccaacgagtaccggctgagcaagagaggccttagaggctggcgggaaatcatccagaaatggctgaaaatggacgagaacgagccctccgagaagtacctggaagtgttcaaggactaccagcggaagcaccctagagaggccggcgattacagcgtgtacgagttcctgtccaagaaagagaaccacttcatctggcggaatcaccctgagtacccctacctgtacgccaccttctgcgagatcgacaagaaaaagaaggacgccaagcagcaggccaccttcacactggccgatcctatcaatcaccctctgtgggtccgattcgaggaaagaagcggcagcaacctgaacaagtacagaatcctgaccgagcagctgcacaccgagaagctgaagaaaaagctgacagtgcagctggaccggctgatctaccctacagaatctggcggctgggaagagaagggcaaagtggacattgtgctgctgcccagccggcagttctacaaccagatcttcctggacatcgaggaaaagggcaagcacgccttcacctacaaggatgagagcatcaagttccctctgaagggcacactcggcggagccagagtgcagttcgacagagatcacctgagaagataccctcacaaggtggaaagcggcaacgtgggcagaatctacttcaacatgaccgtgaacatcgagcctacagagtccccagtgtccaagtctctgaagatccaccgggacgacttccccaaggtggtcaacttcaagcccaaagaactgaccgagtggatcaaggacagcaagggcaagaaactgaagtccggcatcgagtccctggaaatcggcctgagagtgatgagcatcgacctgggacagagacaggccgctgccgcctctattttcgaggtggtggatcagaagcccgacatcgaaggcaagctgtttttcccaatcaagggcaccgagctgtatgccgtgcacagagccagcttcaacatcaagctgcccggcgagacactggtcaagagcagagaagtgctgcggaaggccagagaggacaatctgaaactgatgaaccagaagctcaacttcctgcggaacgtgctgcacttccagcagttcgaggacatcaccgagagagagaagcgggtcaccaagtggatcagcagacaagagaacagcgacgtgcccctggtgtaccaggatgagctgatccagatccgcgagctgatgtacaagccttacaaggactgggtcgccttcctgaagcagctccacaagagactggaagtcgagatcggcaaagaagtgaagcactggcggaagtccctgagcgacggaagaaagggcctgtacggcatctccctgaagaacatcgacgagatcgatcggacccggaagttcctgctgagatggtccctgaggcctaccgaacctggcgaagtgcgtagactggaacccggccagagattcgccatcgaccagctgaatcacctgaacgccctgaaagaagatcggctgaagaagatggccaacaccatcatcatgcacgccctgggctactgctacgacgtgcggaagaagaaatggcaggctaagaaccccgcctgccagatcatcctgttcgaggatctgagcaactacaacccctacgaggaaaggtcccgcttcgagaacagcaagctcatgaagtggtccagacgcgagatccccagacaggttgcactgcagggcgagatctatggcctgcaagtgggagaagtgggcgctcagttcagcagcagattccacgccaagacaggcagccctggcatcagatgtagcgtcgtgaccaaagagaagctgcaggacaatcggttcttcaagaatctgcagagagagggcagactgaccctggacaaaatcgccgtgctgaaagagggcgatctgtacccagacaaaggcggcgagaagttcatcagcctgagcaaggatcggaagtgcgtgaccacacacgccgacatcaacgccgctcagaacctgcagaagcggttctggacaagaacccacggcttctacaaggtgtactgcaaggcctaccaggtggacggccagaccgtgtacatccctgagagcaaggaccagaagcagaagatcatcgaagagttcggcgagggctacttcattctgaaggacggggtgtacgaatgggtcaacgccggcaagggaggctctggaggaagctccgaagtcgagttttcccatgagtactggatgagacacgcattgactctcgcaaagagggctcgagatgaacgcgaggtgcccgtgggggcagtactcgtgctcaacaatcgcgtaatcggcgaaggttggaatagggcaatcggactccacgaccccactgcacatgcggaaatcatggcccttcgacagggagggcttgtgatgcagaattatcgactttatgatgcgacgctgtacgtcacgtttgaaccttgcgtaatgtgcgcgggagctatgattcactcccgcattggacgagttgtattcggtgttcgcaacgccaagacgggtgccgcaggttcactgatggacgtgctgcatcatccaggcatgaaccaccgggtagaaatcacagaaggcatattggcggacgaatgtgcggcgctgttgtgtcgtttttttcgcatgcccaggcgggtctttaacgcccagaaaaaagcacaatcctctactgacggctcttctggatctgaaacacctggcacaagcgagagcgccacccctgagagctctggcctgaaaatcaagaagggcagctccaagcagagcagcagcgagctggtggatagcgacatcctgaaagacagcttcgacctggcctccgagctgaaaggcgaaaagctgatgctgtacagggaccccagcggcaatgtgttccccagcgacaaatggatggccgctggcgtgttcttcggaaagctggaacgcatcctgatcagcaagctgaccaaccagtactccatcagcaccatcgaggacgacagcagcaagcagtctatgaaaaggccggcggccacgaaaaaggccggccaggcaaaaaagaaaaagggatcctacccatacgatgttccagattacgcttatccctacgacgtgcctgattatgcatacccatatgatgtccccgactatgcctaa

SEQ ID NO: 11 - protein, 1361 aa, synthetic construct
  REGION 1..1361: note = BhCas12b GGSGGS-ABE8-Xten20at K1019 polypeptide sequence
MAPKKKRKVGIHGVPAAATRSFILKIEPNEEVKKGLWKTHEVLNHGIAYYMNILKLIRQEAIYEHHEQDPKNPKKVSKAEIQAELWDFVLKMQKCNSFTHEVDKDEVFNILRELYEELVPSSVEKKGEANQLSNKFLYPLVDPNSQSGKGTASSGRKPRWYNLKIAGDPSWEEEKKKWEEDKKKDPLAKILGKLAEYGLIPLFIPYTDSNEPIVKEIKWMEKSRNQSVRRLDKDMFIQALERFLSWESWNLKVKEEYEKVEKEYKTLEERIKEDIQALKALEQYEKERQEQLLRDTLNTNEYRLSKRGLRGWREIIQKWLKMDENEPSEKYLEVFKDYQRKHPREAGDYSVYEFLSKKENHFIWRNHPEYPYLYATFCEIDKKKKDAKQQATFTLADPINHPLWVRFEERSGSNLNKYRILTEQLHTEKLKKKLTVQLDRLIYPTESGGWEEKGKVDIVLLPSRQFYNQIFLDIEEKGKHAFTYKDESIKFPLKGTLGGARVQFDRDHLRRYPHKVESGNVGRIYFNMTVNIEPTESPVSKSLKIHRDDFPKVVNFKPKELTEWIKDSKGKKLKSGIESLEIGLRVMSIDLGQRQAAAASIFEVVDQKPDIEGKLFFPIKGTELYAVHRASFNIKLPGETLVKSREVLRKAREDNLKLMNQKLNFLRNVLHFQQFEDITEREKRVTKWISRQENSDVPLVYQDELIQIRELMYKPYKDWVAFLKQLHKRLEVEIGKEVKHWRKSLSDGRKGLYGISLKNIDEIDRTRKFLLRWSLRPTEPGEVRRLEPGQRFAIDQLNHLNALKEDRLKKMANTIIMHALGYCYDVRKKKWQAKNPACQIILFEDLSNYNPYEERSRFENSKLMKWSRREIPRQVALQGEIYGLQVGEVGAQFSSRFHAKTGSPGIRCSVVTKEKLQDNRFFKNLQREGRLTLDKIAVLKEGDLYPDKGGEKFISLSKDRKCVTTHADINAAQNLQKRFWTRTHGFYKVYCKAYQVDGQTVYIPESKDQKQKIIEEFGEGYFILKDGVYEWVNAGKGGSGGSSEVEFSHEYWMRHALTLAKRARDEREVPVGAVLVLNNRVIGEGWNRAIGLHDPTAHAEIMALRQGGLVMQNYRLYDATLYVTFEPCVMCAGAMIHSRIGRVVFGVRNAKTGAAGSLMDVLHHPGMNHRVEITEGILADECAALLCRFFRMPRRVFNAQKKAQSSTDGSSGSETPGTSESATPESSGLKIKKGSSKQSSSELVDSDILKDSFDLASELKGEKLMLYRDPSGNVFPSDKWMAAGVFFGKLERILISKLTNQYSISTIEDDSSKQSMKRPAATKKAGQAKKKKGSYPYDVPDYAYPYDVPDYAYPYDVPDYA

SEQ ID NO: 12 - protein, 208 aa, Petromyzon marinus
  REGION 1..208: note = MISC_FEATURE - tr|A5H718|A5H718_PETMA Cytosine deaminase OS=Petromyzon marinusOX=7757 PE=2 SV=1 amino acid sequence; PmCDA1 polypeptide sequence
MTDAEYVRIHEKLDIYTFKKQFFNNKKSVSHRCYVLFELKRRGERRACFWGYAVNKPQSGTERGIHAEIFSIRKVEEYLRDNPGQFTINWYSSWSPCADCAEKILEWYNQELRGNGHTLKIWACKLYYEKNARNQIGLWNLRDNGVGLNVMVSEHYQCCRKIFIQSSHNQLNENRWLEKTLKRAEKRRSELSIMIQVKILHTTKSPAV

SEQ ID NO: 13 - DNA, 766 bp, Petromyzon marinus
  misc_feature 1..766: note = EF094822.1 Petromyzon marinus isolate PmCDA.21 cytosine deaminase mRNA, complete cds; PmCDA1 polynucleotide sequence
  source 1..766: mol_type = genomic DNA
tgacacgacacagccgtgtatatgaggaagggtagctggatggggggggggggaatacgttcagagaggacattagcgagcgtcttgttggtggccttgagtctagacacctgcagacatgaccgacgctgagtacgtgagaatccatgagaagttggacatctacacgtttaagaaacagtttttcaacaacaaaaaatccgtgtcgcatagatgctacgttctctttgaattaaaacgacggggtgaacgtagagcgtgtttttggggctatgctgtgaataaaccacagagcgggacagaacgtggaattcacgccgaaatctttagcattagaaaagtcgaagaatacctgcgcgacaaccccggacaattcacgataaattggtactcatcctggagtccttgtgcagattgcgctgaaaagatcttagaatggtataaccaggagctgcgggggaacggccacactttgaaaatctgggcttgcaaactctattacgagaaaaatgcgaggaatcaaattgggctgtggaacctcagagataacggggttgggttgaatgtaatggtaagtgaacactaccaatgttgcaggaaaatattcatccaatcgtcgcacaatcaattgaatgagaatagatggcttgagaagactttgaagcgagctgaaaaacgacggagcgagttgtccattatgattcaggtaaaaatactccacaccactaagagtcctgctgtttaagaggctatgcggatggttttc

SEQ ID NO: 14 - protein, 145 aa, Homo sapiens
  REGION 1..145: note = MISC_FEATURE - tr|Q6QJ80|Q6QJ80_HUMAN Activation-induced cytidine deaminase OS=Homo sapiens; OX = 9606 GN=AICDA PE=2 SV=1; AID polypeptide sequence
MDSLLMNRRKFLYQFKNVRWAKGRRETYLCYVVKRRDSATSFSLDFGYLRNKNGCHVELLFLRYISDWDLDPGRCYRVTWFTSWSPCYDCARHVADFLRGNPNLSLRIFTARLYFCEDRKAEPEGLRRLHRAGVQIAIMTFKAPV

SEQ ID NO: 15 - DNA, 10681 bp, Homo sapiens
  misc_feature 1..10681: note = NG_011588.1:5001-15681 Homo sapiens activation induced cytidine deaminase (AICDA), RefSeqGene (LRG_17) on chromosome 12; nucleic acid sequence of the CDS of human AID; polynucleotide sequence
  source 1..10681: mol_type = genomic DNA
agagaaccatcattaattgaagtgagatttttctggcctgagacttgcagggaggcaagaagacactctggacaccactatggacaggtaaagaggcagtcttctcgtgggtgattgcactggccttcctctcagagcaaatctgagtaatgagactggtagctatccctttctctcatgtaactgtctgactgataagatcagcttgatcaatatgcatatatattttttgatctgtctccttttcttctattcagatcttatacgctgtcagcccaattctttctgtttcagacttctcttgatttccctctttttcatgtggcaaaagaagtagtgcgtacaatgtactgattcgtcctgagatttgtaccatggttgaaactaatttatggtaataatattaacatagcaaatctttagagactcaaatcatgaaaaggtaatagcagtactgtactaaaaacggtagtgctaattttcgtaataattttgtaaatattcaacagtaaaacaacttgaagacacactttcctagggaggcgttactgaaataatttagctatagtaagaaaatttgtaattttagaaatgccaagcattctaaattaattgcttgaaagtcactatgattgtgtccattataaggagacaaattcattcaagcaagttatttaatgttaaaggcccaattgttaggcagttaatggcacttttactattaactaatctttccatttgttcagacgtagcttaacttacctcttaggtgtgaatttggttaaggtcctcataatgtctttatgtgcagtttttgataggttattgtcatagaacttattctattcctacatttatgattactatggatgtatgagaataacacctaatccttatactttacctcaatttaactcctttataaagaacttacattacagaataaagattttttaaaaatatatttttttgtagagacagggtcttagcccagccgaggctggtctctaagtcctggcccaagcgatcctcctgcctgggcctcctaaagtgctggaattatagacatgagccatcacatccaatatacagaataaagatttttaatggaggatttaatgttcttcagaaaattttcttgaggtcagacaatgtcaaatgtctcctcagtttacactgagattttgaaaacaagtctgagctataggtccttgtgaagggtccattggaaatacttgttcaaagtaaaatggaaagcaaaggtaaaatcagcagttgaaattcagagaaagacagaaaaggagaaaagatgaaattcaacaggacagaagggaaatatattatcattaaggaggacagtatctgtagagctcattagtgatggcaaaatgacttggtcaggattatttttaacccgcttgtttctggtttgcacggctggggatgcagctagggttctgcctcagggagcacagctgtccagagcagctgtcagcctgcaagcctgaaacactccctcggtaaagtccttcctactcaggacagaaatgacgagaacagggagctggaaacaggcccctaaccagagaagggaagtaatggatcaacaaagttaactagcaggtcaggatcacgcaattcatttcactctgactggtaacatgtgacagaaacagtgtaggcttattgtattttcatgtagagtaggacccaaaaatccacccaaagtcctttatctatgccacatccttcttatctatacttccaggacactttttcttccttatgataaggctctctctctctccacacacacacacacacacacacacacacacacacacacacacacaaacacacaccccgccaaccaaggtgcatgtaaaaagatgtagattcctctgcctttctcatctacacagcccaggagggtaagttaatataagagggatttattggtaagagatgatgcttaatctgtttaacactgggcctcaaagagagaatttcttttcttctgtacttattaagcacctattatgtgttgagcttatatatacaaagggttattatatgctaatatagtaatagtaatggtggttggtactatggtaattaccataaaaattattatccttttaaaataaagctaattattattggatcttttttagtattcattttatgttttttatgtttttgattttttaaaagacaatctcaccctgttacccaggctggagtgcagtggtgcaatcatagctttctgcagtcttgaactcctgggctcaagcaatcctcctgccttggcctcccaaagtgttgggatacagtcatgagccactgcatctggcctaggatccatttagattaaaatatgcattttaaattttaaaataatatggctaatttttaccttatgtaatgtgtatactggcaataaatctagtttgctgcctaaagtttaaagtgctttccagtaagcttcatgtacgtgaggggagacatttaaagtgaaacagacagccaggtgtggtggctcacgcctgtaatcccagcactctgggaggctgaggtgggtggatcgcttgagccctggagttcaagaccagcctgagcaacatggcaaaacgctgtttctataacaaaaattagccgggcatggtggcatgtgcctgtggtcccagctactagggggctgaggcaggagaatcgttggagcccaggaggtcaaggctgcactgagcagtgcttgcgccactgcactccagcctgggtgacaggaccagaccttgcctcaaaaaaataagaagaaaaattaaaaataaatggaaacaactacaaagagctgttgtcctagatgagctacttagttaggctgatattttggtatttaacttttaaagtcagggtctgtcacctgcactacattattaaaatatcaattctcaatgtatatccacacaaagactggtacgtgaatgttcatagtacctttattcacaaaaccccaaagtagagactatccaaatatccatcaacaagtgaacaaataaacaaaatgtgctatatccatgcaatggaataccaccctgcagtacaaagaagctacttggggatgaatcccaaagtcatgacgctaaatgaaagagtcagacatgaaggaggagataatgtatgccatacgaaattctagaaaatgaaagtaacttatagttacagaaagcaaatcagggcaggcatagaggctcacacctgtaatcccagcactttgagaggccacgtgggaagattgctagaactcaggagttcaagaccagcctgggcaacacagtgaaactccattctccacaaaaatgggaaaaaaagaaagcaaatcagtggttgtcctgtggggaggggaaggactgcaaagagggaagaagctctggtggggtgagggtggtgattcaggttctgtatcctgactgtggtagcagtttggggtgtttacatccaaaaatattcgtagaattatgcatcttaaatgggtggagtttactgtatgtaaattatacctcaatgtaagaaaaaataatgtgtaagaaaactttcaattctcttgccagcaaacgttattcaaattcctgagccctttacttcgcaaattctctgcacttctgccccgtaccattaggtgacagcactagctccacaaattggataaatgcatttctggaaaagactagggacaaaatccaggcatcacttgtgctttcatatcaaccatgctgtacagcttgtgttgctgtctgcagctgcaatggggactcttgatttctttaaggaaacttgggttaccagagtatttccacaaatgctattcaaattagtgcttatgatatgcaagacactgtgctaggagccagaaaacaaagaggaggagaaatcagtcattatgtgggaacaacatagcaagatatttagatcattttgactagttaaaaaagcagcagagtacaaaatcacacatgcaatcagtataatccaaatcatgtaaatatgtgcctgtagaaagactagaggaataaacacaagaatcttaacagtcattgtcattagacactaagtctaattattattattagacactatgatatttgagatttaaaaaatctttaatattttaaaatttagagctcttctatttttccatagtattcaagtttgacaatgatcaagtattactctttctttttttttttttttttttttttttgagatggagttttggtcttgttgcccatgctggagtggaatggcatgaccatagctcactgcaacctccacctcctgggttcaagcaaagctgtcgcctcagcctcccgggtagatgggattacaggcgcccaccaccacactcggctaatgtttgtatttttagtagagatggggtttcaccatgttggccaggctggtctcaaactcctgacctcagaggatccacctgcctcagcctcccaaagtgctgggattacagatgtaggccactgcgcccggccaagtattgctcttatacattaaaaaacaggtgtgagccactgcgcccagccaggtattgctcttatacattaaaaaataggccggtgcagtggctcacgcctgtaatcccagcactttgggaagccaaggcgggcagaacacccgaggtcaggagtccaaggccagcctggccaagatggtgaaaccccgtctctattaaaaatacaaacattacctgggcatgatggtgggcgcctgtaatcccagctactcaggaggctgaggcaggaggatccgcggagcctggcagatctgcctgagcctgggaggttgaggctacagtaagccaagatcatgccagtatacttcagcctgggcgacaaagtgagaccgtaacaaaaaaaaaaaaatttaaaaaaagaaatttagatcaagatccaactgtaaaaagtggcctaaacaccacattaaagagtttggagtttattctgcaggcagaagagaaccatcagggggtcttcagcatgggaatggcatggtgcacctggtttttgtgagatcatggtggtgacagtgtggggaatgttattttggagggactggaggcagacagaccggttaaaaggccagcacaacagataaggaggaagaagatgagggcttggaccgaagcagagaagagcaaacagggaaggtacaaattcaagaaatattggggggtttgaatcaacacatttagatgattaattaaatatgaggactgaggaataagaaatgagtcaaggatggttccaggctgctaggctgcttacctgaggtggcaaagtcgggaggagtggcagtttaggacagggggcagttgaggaatattgttttgatcattttgagtttgaggtacaagttggacacttaggtaaagactggaggggaaatctgaatatacaattatgggactgaggaacaagtttattttattttttgtttcgttttcttgttgaagaacaaatttaattgtaatcccaagtcatcagcatctagaagacagtggcaggaggtgactgtcttgtgggtaagggtttggggtccttgatgagtatctctcaattggccttaaatataagcaggaaaaggagtttatgatggattccaggctcagcagggctcaggagggctcaggcagccagcagaggaagtcagagcatcttctttggtttagcccaagtaatgacttccttaaaaagctgaaggaaaatccagagtgaccagattataaactgtactcttgcattttctctccctcctctcacccacagcctcttgatgaaccggaggaagtttctttaccaattcaaaaatgtccgctgggctaagggtcggcgtgagacctacctgtgctacgtagtgaagaggcgtgacagtgctacatccttttcactggactttggttatcttcgcaataaggtatcaattaaagtcggctttgcaagcagtttaatggtcaactgtgagtgcttttagagccacctgctgatggtattacttccatccttttttggcatttgtgtctctatcacattcctcaaatccttttttttatttctttttccatgtccatgcacccatattagacatggcccaaaatatgtgatttaattcctccccagtaatgctgggcaccctaataccactccttccttcagtgccaagaacaactgctcccaaactgtttaccagctttcctcagcatctgaattgcctttgagattaattaagctaaaagcatttttatatgggagaatattatcagcttgtccaagcaaaaattttaaatgtgaaaaacaaattgtgtcttaagcatttttgaaaattaaggaagaagaatttgggaaaaaattaacggtggctcaattctgtcttccaaatgatttcttttccctcctactcacatgggtcgtaggccagtgaatacattcaacatggtgatccccagaaaactcagagaagcctcggctgatgattaattaaattgatctttcggctacccgagagaattacatttccaagagacttcttcaccaaaatccagatgggtttacataaacttctgcccacgggtatctcctctctcctaacacgctgtgacgtctgggcttggtggaatctcagggaagcatccgtggggtggaaggtcatcgtctggctcgttgtttgatggttatattaccatgcaattttctttgcctacatttgtattgaatacatcccaatctccttcctattcggtgacatgacacattctatttcagaaggctttgattttatcaagcactttcatttacttctcatggcagtgcctattacttctcttacaatacccatctgtctgctttaccaaaatctatttccccttttcagatcctcccaaatggtcctcataaactgtcctgcctccacctagtggtccaggtatatttccacaatgttacatcaacaggcacttctagccattttccttctcaaaaggtgcaaaaagcaacttcataaacacaaattaaatcttcggtgaggtagtgtgatgctgcttcctcccaactcagcgcacttcgtcttcctcattccacaaaaacccatagccttccttcactctgcaggactagtgctgccaagggttcagctctacctactggtgtgctcttttgagcaagttgcttagcctctctgtaacacaaggacaatagctgcaagcatccccaaagatcattgcaggagacaatgactaaggctaccagagccgcaataaaagtcagtgaattttagcgtggtcctctctgtctctccagaacggctgccacgtggaattgctcttcctccgctacatctcggactgggacctagaccctggccgctgctaccgcgtcacctggttcacctcctggagcccctgctacgactgtgcccgacatgtggccgactttctgcgagggaaccccaacctcagtctgaggatcttcaccgcgcgcctctacttctgtgaggaccgcaaggctgagcccgaggggctgcggcggctgcaccgcgccggggtgcaaatagccatcatgaccttcaaaggtgcgaaagggccttccgcgcaggcgcagtgcagcagcccgcattcgggattgcgatgcggaatgaatgagttagtggggaagctcgaggggaagaagtgggcggggattctggttcacctctggagccgaaattaaagattagaagcagagaaaagagtgaatggctcagagacaaggccccgaggaaatgagaaaatggggccagggttgcttctttcccctcgatttggaacctgaactgtcttctacccccatatccccgcctttttttcctttttttttttttgaagattatttttactgctggaatacttttgtagaaaaccacgaaagaactttcaaagcctgggaagggctgcatgaaaattcagttcgtctctccagacagcttcggcgcatccttttggtaaggggcttcctcgctttttaaattttctttctttctctacagtcttttttggagtttcgtatatttcttatattttcttattgttcaatcactctcagttttcatctgatgaaaactttatttctcctccacatcagctttttcttctgctgtttcaccattcagagccctctgctaaggttccttttccctcccttttctttcttttgttgtttcacatctttaaatttctgtctctccccagggttgcgtttccttcctggtcagaattcttttctcctttttttttttttttttttttttttttaaacaaacaaacaaaaaacccaaaaaaactctttcccaatttactttcttccaacatgttacaaagccatccactcagtttagaagactctccggccccaccgacccccaacctcgttttgaagccattcactcaatttgcttctctctttctctacagcccctgtatgaggttgatgacttacgagacgcatttcgtactttgggactttgatagcaacttccaggaatgtcacacacgatgaaatatctctgctgaagacagtggataaaaaacagtccttcaagtcttctctgtttttattcttcaactctcactttcttagagtttacagaaaaaatatttatatacgactctttaaaaagatctatgtcttgaaaatagagaaggaacacaggtctggccagggacgtgctgcaattggtgcagttttgaatgcaacattgtcccctactgggaataacagaactgcaggacctgggagcatcctaaagtgtcaacgtttttctatgacttttaggtaggatgagagcagaaggtagatcctaaaaagcatggtgagaggatcaaatgtttttatatcaacatcctttattatttgattcatttgagttaacagtggtgttagtgatagatttttctattcttttcccttgacgtttactttcaagtaacacaaactcttccatcaggccatgatctataggacctcctaatgagagtatctgggtgattgtgaccccaaaccatctctccaaagcattaatatccaatcatgcgctgtatgttttaatcagcagaagcatgtttttatgtttgtacaaaagaagattgttatgggtggggatggaggtatagaccatgcatggtcaccttcaagctactttaataaaggatcttaaaatgggcaggaggactgtgaacaagacaccctaataatgggttgatgtctgaagtagcaaatcttctggaaacgcaaactcttttaaggaagtccctaatttagaaacacccacaaacttcacatatcataattagcaaacaattggaaggaagttgcttgaatgttggggagaggaaaatctattggctctcgtgggtctcttcatctcagaaatgccaatcaggtcaaggtttgctacattttgtatgtgtgtgatgcttctcccaaaggtatattaactatataagagagttgtgacaaaacagaatgataaagctgcgaaccgtggcacacgctcatagttctagctgcttgggaggttgaggagggaggatggcttgaacacaggtgttcaaggccagcctgggcaacataacaagatcctgtctctcaaaaaaaaaaaaaaaaaaaagaaagagagagggccgggcgtggtggctcacgcctgtaatcccagcactttgggaggccgagccgggcggatcacctgtggtcaggagtttgagaccagcctggccaacatggcaaaaccccgtctgtactcaaaatgcaaaaattagccaggcgtggtagcaggcacctgtaatcccagctacttgggaggctgaggcaggagaatcgcttgaacccaggaggtggaggttgcagtaagctgagatcgtgccgttgcactccagcctgggcgacaagagcaagactctgtctcagaaaaaaaaaaaaaaaagagagagagagagaaagagaacaatatttgggagagaaggatggggaagcattgcaaggaaattgtgctttatccaacaaaatgtaaggagccaataagggatccctatttgtctcttttggtgtctatttgtccctaacaactgtctttgacagtgagaaaaatattcagaataaccatatccctgtgccgttattacctagcaacccttgcaatgaagatgagcagatccacaggaaaacttgaatgcacaactgtcttattttaatcttattgtacataagtttgtaaaagagttaaaaattgttacttcatgtattcatttatattttatattattttgcgtctaatgattttttattaacatgatttccttttctgatatattgaaatggagtctcaaagcttcataaatttataactttagaaatgattctaataacaacgtatgtaattgtaacattgcagtaatggtgctacgaagccatttctcttgatttttagtaaacttttatgacagcaaatttgcttctggctcactttcaatcagttaaataaatgataaataattttggaagctgtgaagataaaataccaaataaaataatataaaagtgatttatatgaagttaaaataaaaaatcagtatgatggaataaacttg

SEQ ID NO: 16 - protein, 198 aa, Homo sapiens [sequence omitted]

SEQ ID NO: 17 - protein, 198 aa, Canis lupus
  REGION 1..198: note = MISC_FEATURE - Canine AID (clAID) polypeptide sequence
  REGION 1..30: note = MISC_FEATURE - Nuclear localization sequence
  REGION 183..198: note = MISC_FEATURE - Nuclear export signal
MDSLLMKQRKFLYHFKNVRWAKGRHETYLCYVVKRRDSATSFSLDFGHLRNKSGCHVELLFLRYISDWDLDPGRCYRVTWFTSWSPCYDCARHVADFLRGYPNLSLRIFAARLYFCEDRKAEPEGLRRLHRAGVQIAIMTFKDYFYCWNTFVENREKTFKAWEGLHENSVRLSRQLRRILLPLYEVDDLRDAFRTLGL

SEQ ID NO: 18 - protein, 199 aa, Bos taurus
  REGION 1..199: note = MISC_FEATURE - Bovine AID (btAID) polypeptide sequence
  REGION 1..30: note = MISC_FEATURE - Nuclear localization sequence
  REGION 183..199: note = MISC_FEATURE - Nuclear export signal
MDSLLKKQRQFLYQFKNVRWAKGRHETYLCYVVKRRDSPTSFSLDFGHLRNKAGCHVELLFLRYISDWDLDPGRCYRVTWFTSWSPCYDCARHVADFLRGYPNLSLRIFTARLYFCDKERKAEPEGLRRLHRAGVQIAIMTFKDYFYCWNTFVENHERTFKAWEGLHENSVRLSRQLRRILLPLYEVDDLRDAFRTLGL

SEQ ID NO: 19 - protein, 239 aa, Rattus sp.
  REGION 1..239: note = MISC_FEATURE - Rat AID polypeptide sequence
  REGION 1..26: note = MISC_FEATURE - Nuclear localization sequence
  REGION 194..239: note = MISC_FEATURE - Nuclear export signal
MAVGSKPKAALVGPHWERERIWCFLCSTGLGTQQTGQTSRWLRPAATQDPVSPPRSLLMKQRKFLYHFKNVRWAKGRHETYLCYVVKRRDSATSFSLDFGYLRNKSGCHVELLFLRYISDWDLDPGRCYRVTWFTSWSPCYDCARHVADFLRGNPNLSLRIFTARLTGWGALPAGLMSPARPSDYFYCWNTFVENHERTFKAWEGLHENSVRLSRRLRRILLPLYEVDDLRDAFRTLGL

SEQ ID NO: 20 - protein, 198 aa, Mus musculus [sequence omitted]

SEQ ID NO: 21 - protein, 229 aa, Rattus norvegicus [sequence omitted]

SEQ ID NO: 22 - protein, 229 aa, Mesocricetus auratus
  REGION 1..229: note = MISC_FEATURE - maAPOBEC-1 polypeptide sequence
MSSETGPVVVDPTLRRRIEPHEFDAFFDQGELRKETCLLYEIRWGGRHNIWRHTGQNTSRHVEINFIEKFTSERYFYPSTRCSIVWFLSWSPCGECSKAITEFLSGHPNVTLFIYAARLYHHTDQRNRQGLRDLISRGVTIRIMTEQEYCYCWRNFVNYPPSNEVYWPRYPNLWMRLYALELYCIHLGLPPCLKIKRRHQYPLTFFRLNLQSCHYQRIPPHILWATGFI

SEQ ID NO: 23 - protein, 236 aa, Pongo pygmaeus
  REGION 1..236: note = MISC_FEATURE - ppAPOBEC-1 polypeptide sequence
MTSEKGPSTGDPTLRRRIESWEFDVFYDPRELRKETCLLYEIKWGMSRKIWRSSGKNTTNHVEVNFIKKFTSERRFHSSISCSITWFLSWSPCWECSQAIREFLSQHPGVTLVIYVARLFWHMDQRNRQGLRDLVNSGVTIQIMRASEYYHCWRNFVNYPPGDEAHWPQYPPLWMMLYALELHCIILSLPPCLKISRRWQNHLAFFRLHLQNCHYQTIPPHILLATGLIHPSVTWR

SEQ ID NO: 24 - protein, 236 aa, Oryctolagus cuniculus
  REGION 1..236: note = MISC_FEATURE - ocAPOBEC1 polypeptide sequence
MASEKGPSNKDYTLRRRIEPWEFEVFFDPQELRKEACLLYEIKWGASSKTWRSSGKNTTNHVEVNFLEKLTSEGRLGPSTCCSITWFLSWSPCWECSMAIREFLSQHPGVTLIIFVARLFQHMDRRNRQGLKDLVTSGVTVRVMSVSEYCYCWENFVNYPPGKAAQWPRYPPRWMLMYALELYCIILGLPPCLKISRRHQKQLTFFSLTPQYCHYKMIPPYILLATGLLQPSVPWR

SEQ ID NO: 25 - protein, 235 aa, Monodelphis domestica
  REGION 1..235: note = MISC_FEATURE - mdAPOBEC-1 polypeptide sequence
MNSKTGPSVGDATLRRRIKPWEFVAFFNPQELRKETCLLYEIKWGNQNIWRHSNQNTSQHAEINFMEKFTAERHFNSSVRCSITWFLSWSPCWECSKAIRKFLDHYPNVTLAIFISRLYWHMDQQHRQGLKELVHSGVTIQIMSYSEYHYCWRNFVDYPQGEEDYWPKYPYLWIMLYVLELHCIILGLPPCLKISGSHSNQLALFSLDLQDCHYQKIPYNVLVATGLVQPFVTWR

SEQ ID NO: 26 - protein, 224 aa, Pongo pygmaeus
  REGION 1..224: note = MISC_FEATURE - ppAPOBEC-2 polypeptide sequence
MAQKEEAAAATEAASQNGEDLENLDDPEKLKELIELPPFEIVTGERLPANFFKFQFRNVEYSSGRNKTFLCYVVEAQGKGGQVQASRGYLEDEHAAAHAEEAFFNTILPAFDPALRYNVTWYVSSSPCAACADRIIKTLSKTKNLRLLILVGRLFMWEELEIQDALKKLKEAGCKLRIMKPQDFEYVWQNFVEQEEGESKAFQPWEDIQENFLYYEEKLADILK

SEQ ID NO: 27 - protein, 224 aa, Bos taurus
  REGION 1..224: note = MISC_FEATURE - btAPOBEC-2 polypeptide sequence
MAQKEEAAAAAEPASQNGEEVENLEDPEKLKELIELPPFEIVTGERLPAHYFKFQFRNVEYSSGRNKTFLCYVVEAQSKGGQVQASRGYLEDEHATNHAEEAFFNSIMPTFDPALRYMVTWYVSSSPCAACADRIVKTLNKTKNLRLLILVGRLFMWEEPEIQAALRKLKEAGCRLRIMKPQDFEYIWQNFVEQEEGESKAFEPWEDIQENFLYYEEKLADILK

SEQ ID NO: 28 - protein, 440 aa, Mus musculus
  REGION 1..440: note = MISC_FEATURE - mAPOBEC-3-(1) polypeptide sequence
MQPQRLGPRAGMGPFCLGCSHRKCYSPIRNLISQETFKFHFKNLGYAKGRKDTFLCYEVTRKDCDSPVSLHHGVFKNKDNIHAEICFLYWFHDKVLKVLSPREEFKITWYMSWSPCFECAEQIVRFLATHHNLSLDIFSSRLYNVQDPETQQNLCRLVQEGAQVAAMDLYEFKKCWKKFVDNGGRRFRPWKRLLTNFRYQDSKLQEILRPCYISVPSSSSSTLSNICLTKGLPETRFWVEGRRMDPLSEEEFYSQFYNQRVKHLCYYHRMKPYLCYQLEQFNGQAPLKGCLLSEKGKQHAEILFLDKIRSMELSQVTITCYLTWSPCPNCAWQLAAFKRDRPDLILHIYTSRLYFHWKRPFQKGLCSLWQSGILVDVMDLPQFTDCWTNFVNPKRPFWPWKGLEIISRRTQRRLRRIKESWGLQDLVNDFGNLQLGPPMS

SEQ ID NO: 29 - protein, 429 aa, Mus musculus
  REGION 1..429: note = MISC_FEATURE - APOBEC-3-(2) (Mouse APOBEC-3) polypeptide sequence
  REGION 71..108: note = MISC_FEATURE - Nucleic acid editing domain
  REGION 288..319: note = MISC_FEATURE - Nucleic acid editing domain
MGPFCLGCSHRKCYSPIRNLISQETFKFHFKNLGYAKGRKDTFLCYEVTRKDCDSPVSLHHGVFKNKDNIHAEICFLYWFHDKVLKVLSPREEFKITWYMSWSPCFECAEQIVRFLATHHNLSLDIFSSRLYNVQDPETQQNLCRLVQEGAQVAAMDLYEFKKCWKKFVDNGGRRFRPWKRLLTNFRYQDSKLQEILRPCYIPVPSSSSSTLSNICLTKGLPETRFCVEGRRMDPLSEEEFYSQFYNQRVKHLCYYHRMKPYLCYQLEQFNGQAPLKGCLLSEKGKQHAEILFLDKIRSMELSQVTITCYLTWSPCPNCAWQLAAFKRDRPDLILHIYTSRLYFHWKRPFQKGLCSLWQSGILVDVMDLPQFTDCWTNFVNPKRPFWPWKGLEIISRRTQRRLRRIKESWGLQDLVNDFGNLQLGPPMS

SEQ ID NO: 30 - protein, 430 aa, Rattus sp.
  REGION 1..430: note = MISC_FEATURE - APOBEC-3 polypeptide sequence
  REGION 72..109: note = MISC_FEATURE - Nucleic acid editing domain
  REGION 289..320: note = MISC_FEATURE - Nucleic acid editing domain
MGPFCLGCSHRKCYSPIRNLISQETFKFHFKNRLRYAIDRKDTFLCYEVTRKDCDSPVSLHHGVFKNKDNIHAEICFLYWFHDKVLKVLSPREEFKITWYMSWSPCFECAEQVLRFLATHHNLSLDIFSSRLYNIRDPENQQNLCRLVQEGAQVAAMDLYEFKKCWKKFVDNGGRRFRPWKKLLTNFRYQDSKLQEILRPCYIPVPSSSSSTLSNICLTKGLPETRFCVERRRVHLLSEEEFYSQFYNQRVKHLCYYHGVKPYLCYQLEQFNGQAPLKGCLLSEKGKQHAEILFLDKIRSMELSQVIITCYLTWSPCPNCAWQLAAFKRDRPDLILHIYTSRLYFHWKRPFQKGLCSLWQSGILVDVMDLPQFTDCWTNFVNPKRPFWPWKGLEIISRRTQRRLHRIKESWGLQDLVNDFGNLQLGPPMS

SEQ ID NO: 31 - protein, 199 aa, Homo sapiens
  REGION 1..199: note = MISC_FEATURE - hAPOBEC-3A polypeptide sequence
  REGION 70..106: note = MISC_FEATURE - Nucleic acid editing domain
MEASPASGPRHLMDPHIFTSNFNNGIGRHKTYLCYEVERLDNGTSVKMDQHRGFLHNQAKNLLCGFYGRHAELRFLDLVPSLQLDPAQIYRVTWFISWSPCFSWGCAGEVRAFLQENTHVRLRIFAARIYDYDPLYKEALQMLRDAGAQVSIMTYDEFKHCWDTFVDHQGCPFQPWDGLDEHSQALSGRLRAILQNQGN

SEQ ID NO: 32 - protein, 373 aa, Homo sapiens
  REGION 1..373: note = MISC_FEATURE - hAPOBEC-3F polypeptide sequence
  REGION 65..99: note = MISC_FEATURE - Nucleic acid editing domain
  REGION 248..283: note = MISC_FEATURE - Nucleic acid editing domain
MKPHFRNTVERMYRDTFSYNFYNRPILSRRNTVWLCYEVKTKGPSRPRLDAKIFRGQVYSQPEHHAEMCFLSWFCGNQLPAYKCFQITWFVSWTPCPDCVAKLAEFLAEHPNVTLTISAARLYYYWERDYRRALCRLSQAGARVKIMDDEEFAYCWENFVYSEGQPFMPWYKFDDNYAFLHRTLKEILRNPMEAMYPHIFYFHFKNLRKAYGRNESWLCFTMEVVKHHSPVSWKRGVFRNQVDPETHCHAERCFLSWFCDDILSPNTNYEVTWYTSWSPCPECAGEVAEFLARHSNVNLTIFTARLYYFWDTDYQEGLRSLSQEGASVEIMGYKDFKYCWENFVYNDDEPFKPWKGLKYNFLFLDSKLQEILE

SEQ ID NO: 33 - protein, 370 aa, Rhesus macaque
  REGION 1..370: note = MISC_FEATURE - Rhesus macaque APOBEC-3G polypeptide sequence
  REGION 1..61: note = MISC_FEATURE - Cytoplasmic localization signal
MVEPMDPRTFVSNFNNRPILSGLNTVWLCCEVKTKDPSGPPLDAKIFQGKVYSKAKYHPEMRFLRWFHKWRQLHHDQEYKVTWYVSWSPCTRCANSVATFLAKDPKVTLTIFVARLYYFWKPDYQQALRILCQKRGGPHATMKIMNYNEFQDCWNKFVDGRGKPFKPRNNLPKHYTLLQATLGELLRHLMDPGTFTSNFNNKPWVSGQHETYLCYKVERLHNDTWVPLNQHRGFLRNQAPNIHGFPKGRHAELCFLDLIPFWKLDGQQYRVTCFTSWSPCFSCAQEMAKFISNNEHVSLCIFAARIYDDQGRYQEGLRALHRDGAKIAMMNYSEFEYCWDTFVDRQGRPFQPWDGLDEHSQALSGRLRAI

SEQ ID NO: 34 - protein, 384 aa, Pan troglodytes
  REGION 1..384: note = MISC_FEATURE - Chimpanzee APOBEC-3G polypeptide sequence
  REGION 1..60: note = MISC_FEATURE - Cytoplasmic localization signal
  REGION 65..100: note = MISC_FEATURE - Nucleic acid editing domain
  REGION 257..291: note = MISC_FEATURE - Nucleic acid editing domain
MKPHFRNPVERMYQDTFSDNFYNRPILSHRNTVWLCYEVKTKGPSRPPLDAKIFRGQVYSKLKYHPEMRFFHWFSKWRKLHRDQEYEVTWYISWSPCTKCTRDVATFLAEDPKVTLTIFVARLYYFWDPDYQEALRSLCQKRDGPRATMKIMNYDEFQHCWSKFVYSQRELFEPWNNLPKYYILLHIMLGEILRHSMDPPTFTSNFNNELWVRGRHETYLCYEVERLHNDTWVLLNQRRGFLCNQAPHKHGFLEGRHAELCFLDVIPFWKLDLHQDYRVTCFTSWSPCFSCAQEMAKFISNNKHVSLCIFAARIYDDQGRCQEGLRTLAKAGAKISIMTYSEFKHCWDTFVDHQGCPFQPWDGLEEHSQALSGRLRAILQNQGN

SEQ ID NO: 35 - protein, 377 aa, Chlorocebus sabaeus
  REGION 1..377: note = MISC_FEATURE - Green monkey APOBEC-3G polypeptide sequence
  REGION 1..60: note = MISC_FEATURE - Cytoplasmic localization signal
  REGION 65..100: note = MISC_FEATURE - Nucleic acid editing domain
  REGION 257..290: note = MISC_FEATURE - Nucleic acid editing domain
MNPQIRNMVEQMEPDIFVYYFNNRPILSGRNTVWLCYEVKTKDPSGPPLDANIFQGKLYPEAKDHPEMKFLHWFRKWRQLHRDQEYEVTWYVSWSPCTRCANSVATFLAEDPKVTLTIFVARLYYFWKPDYQQALRILCQERGGPHATMKIMNYNEFQHCWNEFVDGQGKPFKPRKNLPKHYTLLHATLGELLRHVMDPGTFTSNFNNKPWVSGQRETYLCYKVERSHNDTWVLLNQHRGFLRNQAPDRHGFPKGRHAELCFLDLIPFWKLDDQQYRVTCFTSWSPCFSCAQKMAKFISNNKHVSLCIFAARIYDDQGRCQEGLRTLHRDGAKIAVMNYSEFEYCWDTFVDRQGRPFQPWDGLDEHSQALSGRLRAI

SEQ ID NO: 36 - protein, 384 aa, Homo sapiens
  REGION 1..384: note = MISC_FEATURE - Human APOBEC-3G polypeptide sequence
  REGION 1..60: note = MISC_FEATURE - Cytoplasmic localization signal
  REGION 65..100: note = MISC_FEATURE - Nucleic acid editing domain
  REGION 257..291: note = MISC_FEATURE - Nucleic acid editing domain
MKPHFRNTVERMYRDTFSYNFYNRPILSRRNTVWLCYEVKTKGPSRPPLDAKIFRGQVYSELKYHPEMRFFHWFSKWRKLHRDQEYEVTWYISWSPCTKCTRDMATFLAEDPKVTLTIFVARLYYFWDPDYQEALRSLCQKRDGPRATMKIMNYDEFQHCWSKFVYSQRELFEPWNNLPKYYILLHIMLGEILRHSMDPPTFTFNFNNEPWVRGRHETYLCYEVERMHNDTWVLLNQRRGFLCNQAPHKHGFLEGRHAELCFLDVIPFWKLDLDQDYRVTCFTSWSPCFSCAQEMAKFISKNKHVSLCIFTARIYDDQGRCQEGLRTLAEAGAKISIMTYSEFKHCWDTFVDHQGCPFQPWDGLDEHSQDLSGRLRAILQNQEN

SEQ ID NO: 37 - protein, 382 aa, Homo sapiens
  REGION 1..382: note = MISC_FEATURE - Human APOBEC-3B polypeptide sequence
  REGION 66..100: note = MISC_FEATURE - Nucleic acid editing domain
  REGION 251..289: note = MISC_FEATURE - Nucleic acid editing domain
MNPQIRNPMERMYRDTFYDNFENEPILYGRSYTWLCYEVKIKRGRSNLLWDTGVFRGQVYFKPQYHAEMCFLSWFCGNQLPAYKCFQITWFVSWTPCPDCVAKLAEFLSEHPNVTLTISAARLYYYWERDYRRALCRLSQAGARVTIMDYEEFAYCWENFVYNEGQQFMPWYKFDENYAFLHRTLKEILRYLMDPDTFTFNFNNDPLVLRRRQTYLCYEVERLDNGTWVLMDQHMGFLCNEAKNLLCGFYGRHAELRFLDLVPSLQLDPAQIYRVTWFISWSPCFSWGCAGEVRAFLQENTHVRLRIFAARIYDYDPLYKEALQMLRDAGAQVSIMTYDEFEYCWDTFVYRQGCPFQPWDGLEEHSQALSGRLRAILQNQGN

SEQ ID NO: 38 - protein, 395 aa, Rattus sp.
  REGION 1..395: note = MISC_FEATURE - Rat APOBEC-3B polypeptide sequence
MQPQGLGPNAGMGPVCLGCSHRRPYSPIRNPLKKLYQQTFYFHFKNVRYAWGRKNNFLCYEVNGMDCALPVPLRQGVFRKQGHIHAELCFIYWFHDKVLRVLSPMEEFKVTWYMSWSPCSKCAEQVARFLAAHRNLSLAIFSSRLYYYLRNPNYQQKLCRLIQEGVHVAAMDLPEFKKCWNKFVDNDGQPFRPWMRLRINFSFYDCKLQEIFSRMNLLREDVFYLQFNNSHRVKPVQNRYYRRKSYLCYQLERANGQEPLKGYLLYKKGEQHVEILFLEKMRSMELSQVRITCYLTWSPCPNCARQLAAFKKDHPDLILRIYTSRLYFWRKKFQKGLCTLWRSGIHVDVMDLPQFADCWTNFVNPQRPFRPWNELEKNSWRIQRRLRRIKESWGL

SEQ ID NO: 39 - protein, 226 aa, Bos taurus
  REGION 1..226: note = MISC_FEATURE - Bovine APOBEC-3B polypeptide sequence
DGWEVAFRSGTVLKAGVLGVSMTEGWAGSGHPGQGACVWTPGTRNTMNLLREVLFKQQFGNQPRVPAPYYRRKTYLCYQLKQRNDLTLDRGCFRNKKQRHAERFIDKINSLDLNPSQSYKIICYITWSPCPNCANELVNFITRNNHLKLEIFASRLYFHWIKSFKMGLQDLQNAGISVAVMTHTEFEDCWEQFVDNQSRPFQPWDKLEQYSASIRRRLQRILTAPI

SEQ ID NO: 40 - protein, 490 aa, Pan troglodytes
  REGION 1..490: note = MISC_FEATURE - Chimpanzee APOBEC-3B polypeptide sequence
MNPQIRNPMEWMYQRTFYYNFENEPILYGRSYTWLCYEVKIRRGHSNLLWDTGVFRGQMYSQPEHHAEMCFLSWFCGNQLSAYKCFQITWFVSWTPCPDCVAKLAKFLAEHPNVTLTISAARLYYYWERDYRRALCRLSQAGARVKIMDDEEFAYCWENFVYNEGQPFMPWYKFDDNYAFLHRTLKEIIRHLMDPDTFTFNFNNDPLVLRRHQTYLCYEVERLDNGTWVLMDQHMGFLCNEAKNLLCGFYGRHAELRFLDLVPSLQLDPAQIYRVTWFISWSPCFSWGCAGQVRAFLQENTHVRLRIFAARIYDYDPLYKEALQMLRDAGAQVSIMTYDEFEYCWDTFVYRQGCPFQPWDGLEEHSQALSGRLRAILQVRASSLCMVPHRPPPPPQSPGPCLPLCSEPPLGSLLPTGRPAPSLPFLLTASFSFPPPASLPPLPSLSLSPGHLPVPSFHSLTSCSIQPPCSSRIRETEGWASVSKEGRDLG

SEQ ID NO: 41 - protein, 190 aa, Homo sapiens
  REGION 1..190: note = MISC_FEATURE - Human APOBEC-3C polypeptide sequence
  REGION 65..100: note = MISC_FEATURE - Nucleic acid editing domain
MNPQIRNPMKAMYPGTFYFQFKNLWEANDRNETWLCFTVEGIKRRSVVSWKTGVFRNQVDSETHCHAERCFLSWFCDDILSPNTKYQVTWYTSWSPCPDCAGEVAEFLARHSNVNLTIFTARLYYFQYPCYQEGLRSLSQEGVAVEIMDYEDFKYCWENFVYNDNEPFKPWKGLKTNFRLLKRRLRESLQ

SEQ ID NO: 42 - protein, 190 aa, Gorilla sp.
  REGION 1..190: note = MISC_FEATURE - Gorilla APOBEC-3C polypeptide sequence
  REGION 65..100: note = MISC_FEATURE - Nucleic acid editing domain
MNPQIRNPMKAMYPGTFYFQFKNLWEANDRNETWLCFTVEGIKRRSVVSWKTGVFRNQVDSETHCHAERCFLSWECDDILSPNTNYQVTWYTSWSPCPECAGEVAEFLARHSNVNLTIFTARLYYFQDTDYQEGLRSLSQEGVAVKIMDYKDFKYCWENFVYNDDEPFKPWKGLKYNFRFLKRRLQEILE

SEQ ID NO: 43 - protein, 202 aa, Rhesus macaque
  REGION 1..202: note = MISC_FEATURE - Rhesus macaque APOBEC-3A polypeptide sequence
  REGION 72..103: note = MISC_FEATURE - Nucleic acid editing domain
MDGSPASRPRHLMDPNTFTFNFNNDLSVRGRHQTYLCYEVERLDNGTWVPMDERRGFLCNKAKNVPCGDYGCHVELRFLCEVPSWQLDPAQTYRVTWFISWSPCFRRGCAGQVRVFLQENKHVRLRIFAARIYDYDPLYQEALRTLRDAGAQVSIMTYEEFKHCWDTFVDRQGRPFQPWDGLDEHSQALSGRLRAILQNQGN

SEQ ID NO: 44 - protein, 185 aa, Bos taurus
  REGION 1..185: note = MISC_FEATURE - Bovine APOBEC-3A polypeptide sequence
  REGION 56..86: note = MISC_FEATURE - Nucleic acid editing domain
MDEYTFTENFNNQGWPSKTYLCYEMERLDGDATIPLDEYKGFVRNKGLDQPEKPCHAELYFLGKIHSWNLDRNQHYRLTCFISWSPCYDCAQKLTTFLKENHHISLHILASRIYTHNRFGCHQSGLCELQAAGARITIMTFEDFKHCWETFVDHKGKPFQPWEGLNVKSQALCTELQAILKTQQN

SEQ ID NO: 45 - protein, 200 aa, Homo sapiens
  REGION 1..200: note = MISC_FEATURE - Human APOBEC-3H polypeptide sequence
  REGION 54..88: note = MISC_FEATURE - Nucleic acid editing domain
MALLTAETFRLQFNNKRRLRRPYYPRKALLCYQLTPQNGSTPTRGYFENKKKCHAEICFINEIKSMGLDETQCYQVTCYLTWSPCSSCAWELVDFIKAHDHLNLGIFASRLYYHWCKPQQKGLRLLCGSQVPVEVMGFPKFADCWENFVDHEKPLSFNPYKMLEELDKNSRAIKRRLERIKIPGVRAQGRYMDILCDAEV

SEQ ID NO: 46 - protein, 210 aa, Rhesus macaque
  REGION 1..210: note = MISC_FEATURE - Rhesus macaque APOBEC-3H polypeptide sequence
MALLTAKTFSLQFNNKRRVNKPYYPRKALLCYQLTPQNGSTPTRGHLKNKKKDHAEIRFINKIKSMGLDETQCYQVTCYLTWSPCPSCAGELVDFIKAHRHLNLRIFASRLYYHWRPNYQEGLLLLCGSQVPVEVMGLPEFTDCWENFVDHKEPPSFNPSEKLEELDKNSQAIKRRLERIKSRSVDVLENGLRSLQLGPVTPSSSIRNSR

SEQ ID NO: 47 - protein, 386 aa, Homo sapiens
  REGION 1..386: note = MISC_FEATURE - Human APOBEC-3D polypeptide sequence
  REGION 78..109: note = MISC_FEATURE - Nucleic acid editing domain
  REGION 262..296: note = MISC_FEATURE - Nucleic acid editing domain
MNPQIRNPMERMYRDTFYDNFENEPILYGRSYTWLCYEVKIKRGRSNLLWDTGVFRGPVLPKRQSNHRQEVYFRFENHAEMCFLSWFCGNRLPANRRFQITWFVSWNPCLPCVVKVTKFLAEHPNVTLTISAARLYYYRDRDWRWVLLRLHKAGARVKIMDYEDFAYCWENFVCNEGQPFMPWYKFDDNYASLHRTLKEILRNPMEAMYPHIFYFHFKNLLKACGRNESWLCFTMEVTKHHSAVFRKRGVFRNQVDPETHCHAERCFLSWFCDDILSPNTNYEVTWYTSWSPCPECAGEVAEFLARHSNVNLTIFTARLCYFWDTDYQEGLCSLSQEGASVKIMGYKDFVSCWKNFVYSDDEPFKPWKGLQTNFRLLKRRLREILQ

SEQ ID NO: 48 - protein, 236 aa, Homo sapiens
  REGION 1..236: note = MISC_FEATURE - Human APOBEC-1 polypeptide sequence
MTSEKGPSTGDPTLRRRIEPWEFDVFYDPRELRKEACLLYEIKWGMSRKIWRSSGKNTTNHVEVNFIKKFTSERDFHPSMSCSITWFLSWSPCWECSQAIREFLSRHPGVTLVIYVARLFWHMDQQNRQGLRDLVNSGVTIQIMRASEYYHCWRNFVNYPPGDEAHWPQYPPLWMMLYALELHCIILSLPPCLKISRRWQNHLTFFRLHLQNCHYQTIPPHILLATGLIHPSVAWR

SEQ ID NO: 49 - protein, 229 aa, Mus musculus
  REGION 1..229: note = MISC_FEATURE - Mouse APOBEC-1 polypeptide sequence
MSSETGPVAVDPTLRRRIEPHEFEVFFDPRELRKETCLLYEINWGGRHSVWRHTSQNTSNHVEVNFLEKFTTERYFRPNTRCSITWFLSWSPCGECSRAITEFLSRHPYVTLFIYIARLYHHTDQRNRQGLRDLISSGVTIQIMTEQEYCYCWRNFVNYPPSNEAYWPRYPHLWVKLYVLELYCIILGLPPCLKILRRKQPQLTFFTITLQTCHYQRIPPHLLWATGLK

SEQ ID NO: 50 - protein, 224 aa, Homo sapiens
  REGION 1..224: note = MISC_FEATURE - Human APOBEC-2 polypeptide sequence
MAQKEEAAVATEAASQNGEDLENLDDPEKLKELIELPPFEIVTGERLPANFFKFQFRNVEYSSGRNKTFLCYVVEAQGKGGQVQASRGYLEDEHAAAHAEEAFFNTILPAFDPALRYNVTWYVSSSPCAACADRIIKTLSKTKNLRLLILVGRLFMWEEPEIQAALKKLKEAGCKLRIMKPQDFEYVWQNFVEQEEGESKAFQPWEDIQENFLYYEEKLADILK

SEQ ID NO: 51 - protein, 224 aa, Mus musculus
  REGION 1..224: note = MISC_FEATURE - Mouse APOBEC-2 polypeptide sequence
MAQKEEAAEAAAPASQNGDDLENLEDPEKLKELIDLPPFEIVTGVRLPVNFFKFQFRNVEYSSGRNKTFLCYVVEVQSKGGQAQATQGYLEDEHAGAHAEEAFFNTILPAFDPALKYNVTWYVSSSPCAACADRILKTLSKTKNLRLLILVSRLFMWEEPEVQAALKKLKEAGCKLRIMKPQDFEYIWQNFVEQEEGESKAFEPWEDIQENFLYYEEKLADILK

SEQ ID NO: 52 - protein, 224 aa, Rattus sp.
  REGION 1..224: note = MISC_FEATURE - Rat APOBEC-2 polypeptide sequence
MAQKEEAAEAAAPASQNGDDLENLEDPEKLKELIDLPPFEIVTGVRLPVNFFKFQFRNVEYSSGRNKTFLCYVVEAQSKGGQVQATQGYLEDEHAGAHAEEAFFNTILPAFDPALKYNVTWYVSSSPCAACADRILKTLSKTKNLRLLILVSRLFMWEEPEVQAALKKLKEAGCKLRIMKPQDFEYLWQNFVEQEEGESKAFEPWEDIQENFLYYEEKLADILK

SEQ ID NO: 53 - protein, 208 aa, Petromyzon marinus
  REGION 1..208: note = MISC_FEATURE - Petromyzon marinus CDA1 (pmCDAl) polypeptide sequence
MTDAEYVRIHEKLDIYTFKKQFFNNKKSVSHRCYVLFELKRRGERRACFWGYAVNKPQSGTERGIHAEIFSIRKVEEYLRDNPGQFTINWYSSWSPCADCAEKILEWYNQELRGNGHTLKIWACKLYYEKNARNQIGLWNLRDNGVGLNVMVSEHYQCCRKIFIQSSHNQLNENRWLEKTLKRAEKRRSELSFMIQVKILHTTKSPAV

SEQ ID NO: 54 - protein, 381 aa, Homo sapiens
  REGION 1..381: note = MISC_FEATURE - Human APOBEC3G D316R D317R polypeptide sequence
MKPHFRNTVERMYRDTFSYNFYNRPILSRRNTVWLCYEVKTKGPSRPPLDAKIFRGQVYSELKYHPEMRFFHWFSKWRKLHRDQEYEVTWYISWSPCTKCTRDMATFLAEDPKVTLTIFVARLYYFWDPDYQEALRSLCQKRDGPRATMKFNYDEFQHCWSKFVYSQRELFEPWNNLPKYYILLHFMLGEILRHSMDPPTFTFNFNNEPWVRGRHETYLCYEVERMHNDTWVLLNQRRGFLCNQAPHKHGFLEGRHAELCFLDVIPFWKLDLDQDYRVTCFTSWSPCFSCAQEMAKFISKKHVSLCIFTARIYRRQGRCQEGLRTLAEAGAKISFTYSEFKHCWDTFVDHQGCPFQPWDGLDEHSQDLSGRLRAILQNQEN

SEQ ID NO: 55 - protein, 182 aa, Homo sapiens
  REGION 1..182: note = MISC_FEATURE - Human APOBEC3G chain A polypeptide sequence
MDPPTFTFNFNNEPWWGRHETYLCYEVERMHNDTWVLLNQRRGFLCNQAPHKHGFLEGRHAELCFLDVIPFWKLDLDQDYRVTCFTSWSPCFSCAQEMAKFISKNKHVSLCIFTARIYDDQGRCQEGLRTLAEAGAKISFTYSEFKHCWDTFVDHQGCPFQPWDGLDEHSQDLSGRLRAILQ

SEQ ID NO: 56 - protein, 184 aa, Homo sapiens
  REGION 1..184: note = MISC_FEATURE - Human APOBEC3G chain A D120R D121R polypeptide sequence
MDPPTFTFNFNNEPWVRGRHETYLCYEVERMHNDTWVLLNQRRGFLCNQAPHKHGFLEGRHAELCFLDVIPFWKLDLDQDYRVTCFTSWSPCFSCAQEMAKFISKNKHVSLCIFTARIYRRQGRCQEGLRTLAEAGAKISFMTYSEFKHCWDTFVDHQGCPFQPWDGLDEHSQDLSGRLRAILQ

SEQ ID NO: 57 - protein, 367 aa, Homo sapiens
  REGION 1..367: note = MISC_FEATURE - hAPOBEC-4 polypeptide sequence
MEPIYEEYLANHGTIVKPYYWLSFSLDCSNCPYHIRTGEEARVSLTEFCQIFGFPYGTTFPQTKHLTFYELKTSSGSLVQKGHASSCTGNYIHPESMLFEMNGYLDSAIYNNDSIRHIILYSNNSPCNEANHCCISKMYNFLITYPGITLSIYFSQLYHTEMDFPASAWNREALRSLASLWPRVVLSPISGGIWHSVLHSFISGVSGSHVFQPILTGRALADRHNAYEINAITGVKPYFTDVLLQTKRNPNTKAQEALESYPLNNAFPGQFFQMPSGQLQPNLPPDLRAPVVFVLVPLRDLPPMHMGQNPNKPRNIVRHLNMPQMSFQETKDLGRLPTGRSVEIVEITEQFASSKEADEKKKKKGKK

SEQ ID NO: 58 - protein, 388 aa, Rattus norvegicus
  REGION 1..388: note = MISC_FEATURE - rAPOBEC-4 polypeptide sequence
MEPLYEEYLTHSGTIVKPYYWLSVSLNCTNCPYHIRTGEEARVPYTEFHQTFGFPWSTYPQTKHLTFYELRSSSGNLIQKGLASNCTGSHTHPESMLFERDGYLDSLIFHDSNIRHIILYSNNSPCDEANHCCISKMYNFLMNYPEVTLSVFFSQLYHTENQFPTSAWNREALRGLASLWPQVTLSAISGGIWQSILETFVSGISEGLTAVRPFTAGRTLTDRYNAYEINCITEVKPYFTDALHSWQKENQDQKVWAASENQPLHNTTPAQWQPDMSQDCRTPAVFMLVPYRDLPPIHVNPSPQKPRTVVRHLNTLQLSASKVKALRKSPSGRPVKKEEARKGSTRSQEANETNKSKWKKQTLFIKSNICHLLEREQKKIGILSSWSV

SEQ ID NO: 59 - protein, 363 aa, Macaca fascicularis
  REGION 1..363: note = MISC_FEATURE - mfAPOBEC-4 polypeptide sequence
MEPTYEEYLANHGTIVKPYYWLSFSLDCSNCPYHIRTGEEARVSLTEFCQIFGFPYGTTYPQTKHLTFYELKTSSGSLVQKGHASSCTGNYIHPESMLFEMNGYLDSAIYNNDSIRHIILYCNNSPCNEANHCCISKVYNFLITYPGITLSIYFSQLYHTEMDFPASAWNREALRSLASLWPRVVLSPISGGIWHSVLHSFVSGVSGSHVFQPILTGRALTDRYNAYEINAITGVKPFFTDVLLHTKRNPNTKAQMALESYPLNNAFPGQSFQMTSGIPPDLRAPVVFVLLPLRDLPPMHMGQDPNKPRNIIRHLNMPQMSFQETKDLERLPTRRSVETVEITERFASSKQAEEKTKKKKGKK

SEQ ID NO: 60 - protein, 218 aa, Rattus norvegicus
  REGION 1..218: note = MISC_FEATURE - rAPOBEC-1 (delta 177-186) polypeptide sequence
MSSETGPVAVDPTLRRRIEPHEFEVFFDPRELRKETCLLYEINWGGRHSIWRHTSQNTNKHVEVNFIEKFTTERYFCPNTRCSITWFLSWSPCGECSRAITEFLSRYPHVTLFIYIARLYHHADPRNRQGLRDLISSGVTIQIMTEQESGYCWRNFVNYSPSNEAHWPRYPHLWVRGLPPCLNILRRKQPQLTFFTIALQSCHYQRLPPHILWATGLK

SEQ ID NO: 61 - protein, 218 aa, Rattus norvegicus
  REGION 1..218: note = MISC_FEATURE - rAPOBEC-1 (delta 202-213) polypeptide sequence
MSSETGPVAVDPTLRRRIEPHEFEVFFDPRELRKETCLLYEINWGGRHSIWRHTSQNTNKHVEVNFIEKFTTERYFCPNTRCSITWFLSWSPCGECSRAITEFLSRYPHVTLFIYIARLYHHADPRNRQGLRDLISSGVTIQIMTEQESGYCWRNFVNYSPSNEAHWPRYPHLWVRLYVLELYCIILGLPPCLNILRRKQPQHYQRLPPHILWATGLK

SEQ ID NO: 62 - protein, 198 aa, Mus musculus
  REGION 1..198: note = MISC_FEATURE - mouse cytidine deaminase polypeptide sequence
  REGION 1..30: note = MISC_FEATURE - Nuclear localization sequence
  REGION 183..198: note = MISC_FEATURE - Nuclear export signal
MDSLLMKQKKFLYHFKNVRWAKGRHETYLCYVVKRRDSATSCSLDFGHLRNKSGCHVELLFLRYISDWDLDPGRCYRVTWFTSWSPCYDCARHVAEFLRWNPNLSLRIFTARLYFCEDRKAEPEGLRRLHRAGVQIGIMTFKDYFYCWNTFVENRERTFKAWEGLHENSVRLTRQLRRILLPLYEVDDLRDAFRMLGF

SEQ ID NO: 63 - protein, 224 aa, Petromyzon marinus
  REGION 1..224: note = MISC_FEATURE - pmCDA-1 polypeptide sequence
MAGYECVRVSEKLDFDTFEFQFENLHYATERHRTYVIFDVKPQSAGGRSRRLWGYIINNPNVCHAELILMSMIDRHLESNPGVYAMTWYMSWSPCANCSSKLNPWLKNLLEEQGHTLTMHFSRIYDRDREGDHRGLRGLKHVSNSFRMGVVGRAEVKECLAEYVEASRRTLTWLDTTESMAAKMRRKLFCILVRCAGMRESGIPLHLFTLQTPLLSGRVVWWRV

SEQ ID NO: 64 - protein, 331 aa, Petromyzon marinus
  REGION 1..331: note = MISC_FEATURE - pmCDA-2 polypeptide sequence
MELREVVDCALASCVRHEPLSRVAFLRCFAAPSQKPRGTVILFYVEGAGRGVTGGHAVNYNKQGTSIHAEVLLLSAVRAALLRRRRCEDGEEATRGCTLHCYSTYSPCRDCVEYIQEFGASTGVRVVIHCCRLYELDVNRRRSEAEGVLRSLSRLGRDFRLMGPRDAIALLLGGRLANTADGESGASGNAWVTETNVVEPLVDMTGFGDEDLHAQVQRNKQIREAYANYASAVSLMLGELHVDPDKFPFLAEFLAQTSVEPSGTPRETRGRPRGASSRGPEIGRQRPADFERALGAYGLFLHPRIVSREADREEIKRDLIVVMRKHNYQGP

SEQ ID NO: 65 - protein, 209 aa, Petromyzon marinus
  REGION 1..209: note = MISC_FEATURE - pmCDA-5 polypeptide sequence
MAGDENVRVSEKLDFDTFEFQFENLHYATERHRTYVIFDVKPQSAGGRSRRLWGYIINNPNVCHAELILMSMIDRHLESNPGVYAMTWYMSWSPCANCSSKLNPWLKNLLEEQGHTLMMHFSRIYDRDREGDHRGLRGLKHVSNSFRMGVVGRAEVKECLAEYVEASRRTLTWLDTTESMAAKMRRKLFCILVRCAGMRESGMPLHLFT

SEQ ID NO: 66 - protein, 158 aa, Saccharomyces cerevisiae
  REGION 1..158: note = MISC_FEATURE - yCD polypeptide sequence
MVTGGMASKWDQKGMDIAYEEAALGYKEGGVPIGGCLINNKDGSVLGRGHNMRFQKGSATLHGEISTLENCGRLEGKVYKDTTLYTTLSPCDMCTGAIIMYGIPRCVVGENVNFKSKGEKYLQTRGHEVVVVDDERCKKIMKQFIDERPQDWFEDIGE

SEQ ID NO: 67 - protein, 194 aa, synthetic construct
  REGION 1..194: note = cytidine deaminase polypeptide sequence
MKPQIRDHRPNPMEAMYPHIFYFHFENLEKAYGRNETWLCFTVEIIKQYLPVPWKKGVFRNQVDPETHCHAEKCFLSWFCNNTLSPKKNYQVTWYTSWSPCPECAGEVAEFLAEHSNVKLTIYTARLYYFWDTDYQEGLRSLSEEGASVEIMDYEDFQYCWENFVYDDGEPFKRWKGLKYNFQSLTRRLREILQ

SEQ ID NO: 68 - protein, 192 aa, synthetic construct
  REGION 1..192: note = cytidine deaminase polypeptide sequence
MADSSEKMRGQYISRDTFEKNYKPIDGTKEAHLLCEIKWGKYGKPWLHWCQNQRMNIHAEDYFMNNIFKAKKHPVHCYVTWYLSWSPCADCASKIVKFLEERPYLKLTIYVAQLYYHTEEENRKGLRLLRSKKVIIRVMDISDYNYCWKVFVSNQNGNEDYWPLQFDPWVKENYSRLLDIFWESKCRSPNPW

SEQ ID NO: 69 - protein, 280 aa, synthetic construct
  REGION 1..280: note = cytidine deaminase polypeptide sequence
MDPQRLRQWPGPGPASRGGYGQRPRIRNPEEWFHELSPRTFSFHFRNLRFASGRNRSYICCQVEGKNCFFQGIFQNQVPPDPPCHAELCFLSWFQSWGLSPDEHYYVTWFISWSPCCECAAKVAQFLEENRNVSLSLSAARLYYFWKSESREGLRRLSDLGAQVGIMSFQDFQHCWNNFVHNLGMPFQPWKKLHKNYQRLVTELKQILREEPATYGSPQAQGKVRIGSTAAGLRHSHSHTRSEAHLRPNHSSRQHRILNPPREARARTCVLVDASWICYR

SEQ ID NO: 70 - protein, 555 aa, synthetic construct
  REGION 1..555: note = pYY-BEM3.1; tr|F7B644|F7B644_HORSE polypeptide sequence
MPRGRARERQRRNPMEKLDAEAFSFHFLNMEFVYDRNCSYLCYQVEGRLSGSPVLSEQGVFPNEVCGKTRRHAELCFLDWFRGRLSPDEYYCVTWFISWSPCSNCAREVAEFLKRHRNVELSIFAARLYYCRDHEQGLQSLCNRGAQLAVMLRKDFTYCWDNFVHNSGREFSPWENIDANSDLLARKLEDLLKNPMEKLHRKTFSFHFRNLKFAKGRKCSYLCYRVEGRLSGSPGLSEQGVFLNEVCDENCRHAELCFLHWFRGRLSPHADYRVTWFISWSPCSNCAREVAEFLKQHRNVELHISAARLYYWQRNKPGLRNLRSSGAQLAIMFFWDFRDCWDNFVHNSGRHFIPWKKINVNSRLLATKLEDLLKNPLEKLHPNTFSFHFCNLEFAYDRKYSYLCYQVEGRLSGSPGLSEQGVFLNEVCGKTRCHAELCFLDWFRVRLSPDEYYRVTWFISWSPCFYCAREVADFLKQYRNVKLSIFAARLYYCRDHAQGLRSLCSSGAQLAIMFFWDFRYCWDNFVHNSGREFRPWKKINVNSRLLATKLEDILK

SEQ ID NO: 71 - protein, 437 aa, synthetic construct
  REGION 1..437: note = pYY-BEM3.2; tr|D1LZA1|D1LZA1_PANTI polypeptide sequence
MEPWRPSPRNPMDRIDPKTFRFQFPNLRYASGRKLCYLCFQVERDYFYYNDSDWGVFRNEVHPWAPCHAEQCFLSWFRDQYPYRDEDYNVTWFLSWSPCPTCAEEVVEFLEEYRNLTLSIFTSRLYYFWHPNYQEGLCKLWDAGVQLDIMSCDEFEYCWDNFVYHKGMRFQRRNLLKDYDFLAAKLQEILSPGQQRKRDWPFPPRPGAQVDPRSWVQEVTEPGINTRRHPLHLLVSFLLPRPTMNPLQEDIFYRQFGNQHRVPKPYYYRRKTYLCYQLKLPEGTLIDKDCLRNKKKRHAEICFIDKIKSLTRDTSQRFEIICYITWSPCPFCAEELVAFVKDNPHLSLRIFASRLYVHWRWKYQQGLRHLHASGIPVAVMSLPEFEDCWRNFVDHQDRLFQPWRNLDQYSESIKRRLGKILTPLNDLRNDFRNLKLE

SEQ ID NO: 72 - protein, 440 aa, synthetic construct
  REGION 1..440: note = pYY-BEM3.3; tr|A0A3Q0DM17|A0A3Q0DM17_TARSY polypeptide sequence
MPMKRMYSNIYFDHFNNQRLLSGQNAPWLCFKVERVENCMLVPLETGVFGNQVSGCCGKTERPVEPTSLTRSVLVSPNPGTELRAQQPSRKGHLGKLGCVEYPSPGLALVMLGYGASTYCPDSSMYCPETCHHPEMCFLYWFEKTLSHEEQYQITWYVSWSPCVNCAEEVAEFLSVHPKVNLTIYAARLYCYQKLNHRQGLRRLCKEGACVKIMNYEEFDHCWENFVYNNYKSFKPWVKLQDNYELLATELDKILRIPMERMPQKKFRFHFQNLIAKDRNTTWLCFEVKNVRKKHPPDLLERGIFQNQVTPRINCHAEMCFLSWFLENMLLHGKRYQVTWYISWSPCSICAEEVAEFLSAHPKVSLTIYAARLYYFWVPGYRQGLRRLVEEGARVEIMNYEEFDYCWENFVSINNEPFQPWEGLHEKYGYLVTKLNNILG

SEQ ID NO: 73 - protein, 453 aa, synthetic construct
  REGION 1..453: note = pYY-BEM3.4; tr|A0A3Q0DNJ5|A0A3Q0DNJ5_TARSY polypeptide sequence
MEDNPEPRPRQQMDQDTFIFNFNNDPSVRGRHQTFLCYEVEHLDDDTWVPQDKYLGFLHNQPQSRSNAYCAYHAELCFLELVSSWQLDPAQRYRVTCFISWSPCSSCAQEVAAFLKKNRHVTLRILAARIYDYYQGYEDGLRTLQGVGVDITVMTSAEFGHCWNTFVDHQGSPFQPWEGLDQHSQVIWQRMQDILQVIPAKYLMEKVKYTVTVDILFKGRVPGPRYLMDQNTFTRNFINNLSVSGRRQTLLCYEVERLGGDIWVPLDQLRGFLLSQARDVLNYYQGRHAEPCFLDLVSSWQLDPAQHYRVTWFISWSPCTSCAQAVAAFLRENRHVTLRILAARIYDYHQGYEEGLRTLQRTGAHIDIMTFKEFGHCWNTFVNHKGSPFKSWTGLDQHSQALRKRLQDILHTMASSLWDQSEPKKPIPSQEVTLPESIPPSHGNRFRLVKRPS

SEQ ID NO: 74 - protein, 424 aa, synthetic construct
  REGION 1..424: note = pYY-BEM3.5; tr|G5AYU5|G5AYU5_HETGA polypeptide sequence
FCFLSCVHRKPIERIYKKAFRFYFRNLRCAYGRNKTFLCYEVKRERDNKVLHKGVVLNQVEPYMPLHAELRFLSWFHDTLLCPLGSYQVTLYVSWSPCSECAEELTTFLAGHRNVTMTIYVAQLYYCNWKSPNREGLKILIAEDARLRVMFYDEFLYCWRNFVKNDYNNFDPWSLLDENSRYHNRILQNILKGWGRPHRVGPEGEQTATPGGSGGHCISVFSLLRRREMTLKEETFRVQFNNAYKAPKPYRRRVTYLCYQLQEANGDPLTKGCLRTKKGYHAESRFIKRICSMDLGQDQSYQVTCFLTWSPCPHCAQELVSFKRAHPHLRLQIFTARLFFHWKRSYQEGLQRLCRAQVPVAVMGHPEFAYCWDNFVDHQPGPFEPPWAKLEYYSSCLKRRLQQILRSWGVDDLTNDFRNLQLGP

SEQ ID NO: 75 - protein, 385 aa, synthetic construct
  REGION 1..385: note = pYY-BEM3.6; tr|A0A2Y9QMV5|A0A2Y9QMV5_TRIMA polypeptide sequence
MLSSPQTPGTRKPMKTLAPDEFSFNFENLRLAHGRNTTFLCFQVETKAPPSLNSPDSGIFQNQDHCPSHHHAEMVFLTWFQKRLSPAQHYEVTWYMSWSPCSRCAVQVAKFLKSNSTVNLSIFVARLYYPRELETKDGLHSLWQAGAQVQIMFFQDFKYCWENFVNNEGKPFQPWKNLDENSKDWDTELKDIHRNTTDLLTEEMFYSQFYNREKKSSIPRKTYLCYQLNEPQPVKRCLHYKKGYHAVTRFIDGIVSMNLDPARSYDITCYFTWSPCNRYARKLVSFIEDYPNLRLKVYTSRLYFHWCWTNMQGLQHLQNSRVTVAVMTFRDFEYCWKNFVDNQGKPFEPWEKLDLYSQSTERRLRRILKPLTPDVLNEDFGNLHL

SEQ ID NO: 76 - protein, 381 aa, synthetic construct
  REGION 1..381: note = pYY-BEM3.7; tr|H0XHI0|H0XHI0_OTOGA polypeptide sequence
LSCAFRDPMNRMYPKTFCQNFEKEPCPSNQNSSWLCFEVETKNSAVFFHRGVFRNQPAPPPRAPTSVLLSQGPVKTPCHAEECFLTWIQGVLPPDHHYHVTWYVSRGPCANCANLIVHFLAMHRRVTLTIFAAHLNFFWESDFQQGLLRMDQEGVQLHIMGYEEFEYCWDNFVYNQRKQFVPWNGLNENYEFMVSTLEDILRSPLDRIRQKDFSIHFRNSLWLDDKSTWLCFEVKRTKSPVPLYRGVFRNQSPPKTPCHAEVRFFTWLQDLPPDFCCQFTWYLSWSPCADCADLVANFLAKHRNVSLTIFVARLYYYRDPEMHRGLRRMYQEGANVDIMSVIEFEYCWDNFVYNQGKQFVPWNGLNENYEFLVPRLQEILE

SEQ ID NO: 77 - protein, 337 aa, synthetic construct
  REGION 1..337: note = pYY-BEM3.8; tr|A0A3M0K4Y7|A0A3M0K4Y7_HIRRU polypeptide sequence
MYISKKALRRHFDPRVYPRETYLLCELQWEGSRRVWIHWIRNVPDHHAEEYFLEEVFEPRNYGFCNITLYLSWSPCCTCCSKIRDFLKRNPNVKIDIRVARLIYPDYAETRSSLRELNGLQRVSIQVMEAAGLSCIESKNHRISQVERDPKGSSSPTLFTLQDHLKLSNMTESVIQDSVSIQICYQMRILGFQCHIRWKLQPEDFQRNYSPNQIGRVVYLLYEVRWRRGSIWRNWCSNNPEQHAEVNFLENHFHHRPQTPCSITWFLSTSPCGKCSRRILEFLKSQPNVTLEIYAAKLFRHHDIRNRQGLRNLMMNGVTIYIMNLEGNPASLCLSVD

SEQ ID NO: 78 - protein, 237 aa, synthetic construct
  REGION 1..237: note = pYY-BEM3.9; tr|A0A3P4LUZ8|A0A3P4LUZ8_GULGU polypeptide sequence
MSFEDYEYCWETFVDHKGMYFQSWDLLRDNDLLAAELKNILRSTMNPLRQEIFYHQFGNQPRAPRPYHRRKTYLCYQLQPHEGPITARVCLQNKKKRHAEIRFIDNIRALRLDRSQTFEITCYLTWSPCPTCAKALAVFVQDHPHISLRLFASRLFIHWCWKYQEGLRLLHRSRIPVAVMRLQEFEDCWRNFVDNQDEPFQPWNKLEQYSESITRRLRRILGHPQNNLENDFRNLHI

SEQ ID NO: 79 - protein, 221 aa, synthetic construct
  REGION 1..221: note = pYY-BEM3.10; tr|G5BPM8|G5BPM8_HETGA polypeptide sequence
RRRIEPWQFEASFDPRQLRRETCLLSEVRWGTSPRAWRGCSLNTARHAEVSFMDRLTSEGRLRGPVRCSITWFLSWSPCGACAQAIGEFLRQHPNVSLVIYIARLFWHVDEQNRQGLRDLVTRGVRMQVMSDPEFAHCWRNFVNYSPGQEARWPQVPPVWTWLYSLELHCILLNLPPCLKISRRHHNQLTFFQLILQNCHYQAIPSPVLLASGLIHPFVTW

SEQ ID NO: 80 - protein, 211 aa, synthetic construct
  REGION 1..211: note = pYY-BEM3.11; tr|H2M862|H2M862_ORYLA polypeptide sequence
MITKLDSVLLPKKKFIYHYKNMRWARGRHETYLCFVVKRRVGPESLSFDFGHLRNRNGCHVELLFLRHLSALCPGLWGYGATGQGRVSYSITWFCSWSPCANCSFRLAQFLSQTPNLRLRIFVSRLYFCDLEDSREREGLRMLKKVGVHITVMSYKDYFYCWQTFVARKQSKFKPWDGLHQNSVRLSRKLNRILQPCETEDFRDAFKLLGL

SEQ ID NO: 81 - protein, 353 aa, synthetic construct
  REGION 1..353: note = pYY-BEM3.12; tr|H0Y0C6|H0Y0C6_OTOGA polypeptide sequence
MYLKTFYRHFNNRPYLSRRNDTWLCFEVKTTSSNSPGSFYSGVFRNQGPRYCPWHTELCFLTWVRPIVSHHHFYQITWYMSWSPCANCAWQVATFLATHENVSLTNYTVRIYYFWRQDYRQGLLRMIEEGTQVYVMSSKEFQHCWENFVDHWGTRWVTCWNRLKKNYEFLVTRLSEILSDPKERISPNTFYNQFNNTPVPRGRKDTWLCFEVKEKNSNSPGSFHRGVFQNQVFSGTSSHARRCPPDHHYEVTWYTSWSPCAHCAWHVVNFLTSNPNVSLTIFAARLYYIYRPEIQQGLRRVFQEGAKVHIMSLKEFKYCWAKLVYNSGMRFMPWYQFNFNFLFPNTTLKGDLH

SEQ ID NO: 82 - protein, 189 aa, synthetic construct
  REGION 1..189: note = pYY-BEM3.13; tr|A0A3Q2Z5X6|A0A3Q2Z5X6_HIPCM polypeptide sequence
MDVHFMNFIYHYKNMRWAKGRNETYLCFVVKRRVGPNSLTFDFGHLRNRNGCHVELLFLRYLGRRLSYSITWFCSWSPCANCSAALSQFLSRMPNLRLRIFVARLYFCDMEDSHEREGLRLLQKAGVQVTVMSYKDYYYCWQTFVDRKKSHFKAWEDLHQNSVRLSRKLNRILQPCEMDLRDAFKLLGL

SEQ ID NO: 83 - protein, 190 aa, synthetic construct
  REGION 1..190: note = pYY-BEM3.15; tr|A0A2K6NY90|A0A2K6NY90_RHIRO polypeptide sequence
MNPHIRNPMEAMYPGTFYFHFKNLWEADNRNESWLCFAVEVIKHHSTVSWKRGVFRNQVDPETHCHAEKCFLSWFCDNTLSPKKNYQVTWYTSWSPCPECAREVAKFLARHSNVMLTIYTARLYYSQYPNYQEGLRRLNEEGVPVEIMDYEDFKYCWENFVYNGDELFKPWKGLKYNFLFLDSKLQEILE

SEQ ID NO: 84 - protein, 202 aa, synthetic construct
  REGION 1..202: note = pYY-BEM3.16; tr|Q6ICH2|Q6ICH2_HUMAN polypeptide sequence
MNPQIRNPMERMYRDTFYDNFENEPILYGRSYTWLCYEVKIKRGRSNLLWDTGVFRGPVLPKRQSNHRQEVDPETHCHAERCFLSWFCDDILSPNTNYEVTWYTSWSPCPECAGEVAEFLARHSNVNLTIFTARLCYFWDTDYQEGLCSLSQEGASVKIMGYKDFVSCWKNFVYSDDEPFKPWKGLQTNFRLLKRRLREILQ

SEQ ID NO: 85 - protein, 202 aa, synthetic construct
  REGION 1..202: note = pYY-BEM3.17; tr|G8GPV1|G8GPV1_CERNE polypeptide sequence
MDGSPASRPGHVMDPGTFTSNFNNKPWVSGQRETYLCYKVERSHNDTWVLLNQHRGFLRNQAKNRLHGDYGCHAELCFLGEVPSWRLDPTQTYRVTWFISWSPCFSGGCAEQVRAFLQENTHVRLRIFAARIYDYDFLYQEALRTLRDAGAQVSIMTYEEFKHCWDTFVDHQGRPFQPWDGLDEHSQALSGRLQAILQNQGN

SEQ ID NO: 86 - protein, 181 aa, synthetic construct
  REGION 1..181: note = pYY-BEM3.18; tr|Q1WBT6|Q1WBT6_SYMSY polypeptide sequence
MALLTAKTFRLQFNNKRRVTKPYYPRKALLCYQLTPQNGSTPTRGYFKNKKKRHAEIRFINKIKSMGLDETQCYQVTCYLTWSPCPSCAWELVDFIKAHDHLNLGIFASRLYYHWCRHQQEGLRLLCGSQVPVEVMGFPEFADCWENFVDHEEPLSFNPSEMLEELDKNSRAIKRRLEKIK

SEQ ID NO: 87 - protein, 211 aa, synthetic construct
  REGION 1..211: note = pYY-BEM3.19; tr|A0A3B4CS14|A0A3B4CS14_PYGNA polypeptide sequence
MDNTNRRKFIYHYKNVRWARGRHETYLCFVVKKRNSPDSLSFDFGHLRNRNGCHVELLFLRYIEVLCPGLWGSGVDGVRVSYAVTWFCSWSPCSNCAQRLTNFLSQTPNLRLRIFVARLYFCDEEDSLEREGLRHLQRAGVQITVMTYKDFFYCWQTFVASRERCFKAWEGLRQNSVRLSRKLNRILQVFISTPVISPLITTHLGQSWAGG

SEQ ID NO: 88 - protein, 315 aa, synthetic construct
  REGION 1..315: note = pYY-BEM3.20; tr|A0A087XZI4|A0A087XZI4_POEFO polypeptide sequence
RKVSYSVTWFCSWSPCANCSIRLAQFLHQTPNLRLRIFVSRLYFCDLEDSREREGLRILKKAGVHITVMSYKDYFYCWQTFVAKSQSKFKPWDGLHQNYIRLSRKLNRILQPALDIKKFIYHYKNLRWARGRCETYLCFVVKKKLHLFMFVIVGRNRLFDLNVTMNNKSLYLIPLHLQLLFLRHLGALCPGLWGYGVTGERKVSYSVTWFCSWSPCANCSIRLAQFLHQTPNLRLRIFVSRLYFCDLEDSREREGLRILKKAGVHITVMSYKDYFYCWQTFVAKSQSKFKPWDGLHQNYIRLSRKLNRILQVQFF

SEQ ID NO: 89 - protein, 189 aa, synthetic construct
  REGION 1..189: note = pYY-BEM3.21; tr|A0A341AEK4|A0A341AEK4_9CETA polypeptide sequence
MASDRGPSAGDATSRRRIEPWEFEVSFDPRELCKETRLLYEIKWGRSQHVWRHSGKNTTNHVECNFIEKFTSERPFHRSVSCCITWFLSWSPCWECSKAIREFLNQHPRVTLFIYVARLFQHMDPQNRQGLRDLIHSGVTIQIMGPTEYDYCWRNFVNYPPGKEAHWPRYPPPLMKLYALELHCIILVP

SEQ ID NO: 90 - protein, 180 aa, synthetic construct
  REGION 1..180: note = pYY-BEM3.22; tr|E2D879|E2D879_MUSMI polypeptide sequence
RNLISRETFNFNFENLCYAKGRKNTFLCYEVTRKDCDSPVSLCHGVFKNKGSIHAEICFLYWFHDKVLKVLTPREEFKVTWYMSWSPCFECAEQVVRFLATHHNLNLTIFSSRLYNVSDPDTQQKLCRLVQEGAQVAVMDLSEFKKCWEKFVDNDGQQFRPWKRLRTNFRYQNSKLQEIL

SEQ ID NO: 91 - protein, 221 aa, synthetic construct
  REGION 1..221: note = pYY-BEM3.23; tr|A0A2K5RDN6|A0A2K5RDN6_CEBCA polypeptide sequence
MWEAQSPGLSREWGSVAISPEDPGPLHIGRFLSCAFRHPMNAMYPGIFNFHFRNLRKAYGRNETWLCFTVEGIMNRSTVSWKSGVFRNQVGSDPFCHAEMCFLSWFRHNMLSPKKDYEVTWYASWSPCPECAGQVAEFLARHGNVRLTIFTAHLYYFWNPSFRQGLRRLSQEGASVLIMGYEDFEYCWDNFVYNDGQPFKPWKRLQDNSLSLYITLQEILQ

SEQ ID NO: 92 - protein, 206 aa, synthetic construct
  REGION 1..206: note = pYY-BEM3.24; tr|A0A2K5RDN7|A0A2K5RDN7_CEBCA polypeptide sequence
MEASPASRPRPLMGPRTFTENFTNNPEVFGRHQTYLCYEVKCQGPDGTRDLMTEQRDFLCNQARNLLSGFDGRHAERCFLDRVPSWRLDPAQTYRVTCFISWSPCFSCAREVAEFLQENPHVNLRIFAARIYDCRPRYEEGLQMLQNAGAQVSIMTSEEFRHCWDTFVDHQGHPFQPWEGLDEHSQALSRRLQAILQGNRWMILSL

SEQ ID NO: 93 - protein, 184 aa, synthetic construct
  REGION 1..184: note = pYY-BEM3.25; tr|A0A1C9CJ69|A0A1C9CJ69_CERAL polypeptide sequence
NPMKAMDPHIFYFHFKNLRKAYGRNETWLCFAVEIIKQRSTVPWRTGVFRNQVDPESHCHAERCFLSWFCEDILSPNTDYRVTWYTSWSPCLDCAGEVAEFLARHSNVELAIFAARLYYFWDTHYQQGLRSLSEKGASVEIMGYEDFKYCRENFVCDDGKPFKPWKGLKTNFRFLKRRLQEILE

SEQ ID NO: 94 - protein, 197 aa, synthetic construct
  REGION 1..197: note = pYY-BEM3.26; tr|A0A2R2Z4D2|A0A2R2Z4D2_PTEAL polypeptide sequence
MHLQVWRKVTEAWREGYTLKPWSRNPMERLYHDYFYFHFYNLPTPKHRNGCYICYQVEGTKKHSRMPLLRGVFENQESLDMMLSPGEKYRVTWYISWSPCFACVDEVIKFLREHTNVELIIFAARLYHSDILQYRQGLRKLHDAGVHVAIMSYYEFKHCLNDFVFHQGRSFCPWNDLNKNSKNLSNTLEDILRNQED

SEQ ID NO: 95 - protein, 206 aa, synthetic construct
  REGION 1..206: note = pYY-BEM3.27; tr|B7T161|B7T161_SHEEP polypeptide sequence
MTEGWAGSGLPGRGDCVWTPQTRNTMNLLRETLFKQQFGNQPRVPPPYYRRKTYLCYQLKELDDLMLDKGCFRNKKQRHAEIRFIDKINSLNLNPSQSYKIICYITWSPCPNCASELVDFITRNDHLNLQIFASRLYFHWIKPFCRGLHQLQKAGISVAVMTHTEFEDCWEQFVDNQLRPFQPWDKLEQYSASIRRRLQRILTAPT

SEQ ID NO: 96 - protein, 205 aa, synthetic construct
  REGION 1..205: note = pYY-BEM3.28; tr|A0A2R2X2G4|A0A2R2X2G4_PTEAL polypeptide sequence
MAGLGQACEGCCGQMPEISYPMGRLDPKTFSFEFKNLPYAYGRKSSYLCFQVEREQHSSPVPSDWGVFKNQFCGTEPYHAELCFLNWFRAEKLSPYEHYDVTWFLSWSPCSTCAEEIAIFLSNHKNVRLNIFVSRIYYFWKPAFRQGLQELDHLGVQLDAMSFDEFKYCWENFVDNQGMPFRCWKKVHQNYKSVLRKLNEILRRR

SEQ ID NO: 97 - protein, 309 aa, synthetic construct
  REGION 1..309: note = pYY-BEM3.29; tr|G1Q1M4|G1Q1M4_MYOLU polypeptide sequence
YAELSFLDLFQSWNLDRGRQYRLTWYMSWSPYPDCAQKLVEFLGENSHVTLRIFAADIHSLCSGYEDGLRKLRDARAQLAIMTRDELQYCWVTFVDNQGQPFRPWPNLVEHIKTKKQELKDILGNPMRRMYPKTFNFNFQNLNSYGRKSTFLCFEVETWEDGSVLDYQNGVFQNQLDPGHAELCFIEWFHEKVLFPDEVRCPDAQYHVTWYISWSPCFECAEQVAGFLNEHENVDLSISAARLYLCEDEDEQGLQDLVAAGAKVAMMAPEDFEYCWDNFVYNRGWPFTYWKHVRRNYGRLQEKLDEILW

SEQ ID NO: 98 - protein, 216 aa, synthetic construct
  REGION 1..216: note = pYY-BEM3.30; tr|A0A1S3AN78|A0A1S3AN78_ERIEU polypeptide sequence
RRIEPWEFEDFFDPRQFRPETCLLYEVRWGSSRNAWRSTARNTTRHAEVNFLERFAAERHFDKPVSCSITWFLSWSPCWECSQAIGAFLSQHPQVTLAIHVTRLFHHEDEQNRQGLRDLLARGVTLQVMGDSEYAHCWRTFVNSPPGAEGHYPRYPSDFTRLYALELHCIILGLPPCLEILRRYQNQFTLFRLVPQNCHYQMIPHLNFFVVRHYFF

SEQ ID NO: 99 - protein, 201 aa, synthetic construct
  REGION 1..201: note = pYY-BEM3.32; tr|Q4VUI3|Q4VUI3_XENLA polypeptide sequence
MTMDSMLLKRNKFIYHYKNLRWARGRHETYLCYIVKRRYSSVSCALDFGYLRNRNGCHAEMLFLRYLSIWVGHDPHRNYRVTWFSSWSPCYDCAKRTLEFLKGHPNFSLRIFSARLYFCEERNAEPEGLRKLQKAGVRLSVMSYKDYFYCWNTFVETRESGFEAWDGLHENSVRLARKLRRILQPPYDMEDLREVFVLLGL

SEQ ID NO: 100 - protein, 191 aa, synthetic construct
  REGION 1..191: note = pYY-BEM3.33; tr|E2RL86|E2RL86_CANLF polypeptide sequence
MNPLQEETFYQQFSNQRVPKPTYQRRTYLCYQLKPHEGSVIAKVCLQNQEKRHAEICFIDDIKSRQLDPSQKFEITCYVTWSPCPTCAKKLIAFVNDHPHISLRLFASRLYFHWRQKYKRELRHLQKSGIPLAVMSYLEFKDCWEKFVDHKGRPFQPWNKLKQYSESIGRRLQRILQPLNNLENDFRNLRL

SEQ ID NO: 101 - protein, 226 aa, synthetic construct
  REGION 1..226: note = pYY-BEM3.34; tr|G1LWB0|G1LWB0_AILME polypeptide sequence
SSAAPASIHLLDEDTFTENFRNDDWPSRTYLCYKVEGPDQGSGVPLGQDKGILHNKPAQGPEPSRHAECYLLEQIQSWNLDPKLHYGVTCFLSWSPCAKCAQKMARFLQENSHVSLKLFASRLYTRERWDEDYKEGLRTLKRAGASIAIMTYREFEHCWKTFVLHDQEGSCFQPWPFLHKESQKFSEKLQAILQVGVLLLSLPPPLPSSPLSSPWPFPAPLRASTG

SEQ ID NO: 102 - protein, 238 aa, synthetic construct
  REGION 1..238: note = pYY-BEM3.35; tr|A0A1U7S7K7|A0A1U7S7K7_ALLSI polypeptide sequence
MGEHWQYAGSGEYIPQDQFEENFDPSVLLAETHLLSELTWGGRPYKHWYENTEHCHAEIHFLENFSSKNRSCTITWYLSWSPCAECSARIADFMQENTNVKLNIHVARLYLHDDEHTRQGLRYLMKMKRVTIQVMTIPDYTYCWNTFLEDDGEDESDDYGGYAGVHEDEDESDDDDYLPTHFAPWIMLYSLELSCILQGFAPCLKIIQGNHMSPTFQLHVQDQEQKRLLEPANPWGAD

SEQ ID NO: 103 - protein, 220 aa, synthetic construct
  REGION 1..220: note = pYY-BEM3.36; tr|A0A2R2X2J8|A0A2R2X2J8_PTEVA polypeptide sequence
MPRIGNMNLLSEKTFNYHFGNQLRVKKPQGRRRTYLCYKLKLPNETLVKGYFINKKKNHAEIRFINKIRSLNLDQTQSYKITCYITWSPCSYCAGKLVALVKSCPHLSLQIFTSRLYYHWLWKNQAGLRYLWKINISVLVMKEPEFADCWDNFVNHQSRRFKPWEKLTQYSNSTERRLLRILRINRTDLFLAQSSEQDPGLNDLVDAIKRLFLDAHRPRD

SEQ ID NO: 104 - protein, 198 aa, synthetic construct
  REGION 1..198: note = pYY-BEM3.37; tr|A0A151P6M4|A0A151P6M4_ALLMI polypeptide sequence
MAVEEEKGLLGTSQGWKIELKDFQENYMPSTWPKVTHLLYEIRWGKGSKVWRNWCSNTLTQHAEVNCLENAFGKLQFNPPVPCHITWFLSWSPCCQCCRRILQFLRAHSHITLVIKAAQLFKHMDERNRQGLRDLVQSGVHVQVMDLPDYRYCWRTFVSHPHEGEGDFWPWFFPLWITFYTLELQHILLQQHALSYNL

SEQ ID NO: 105 - protein, 158 aa, synthetic construct
  REGION 1..158: note = pYY-BEM3.38; tr|A0A2K6MNR2|A0A2K6MNR2_RHIBE polypeptide sequence
IWLCFTMEIIKQCSTVSWKRGVFRNQVDPETHCHAERCFLSWFWEDTLSPNTNYQVTWYTSWSPCLDCAGEVAEFLARHSNVKLAIFAARLYYFWDTDYQQGLRSLSEEGTSVEIMGYEDFKYCWENFVYNGDEPFKPWKGLKYNFLFLDSKLQEILE

SEQ ID NO: 106 - protein, 182 aa, synthetic construct
  REGION 1..182: note = pYY-BEM3.40; tr|F1CGT0|F1CGT0_ANOCA polypeptide sequence
KAAILLSNLFFRWQMEPEAFQRNFDPREFPECTLLLYEIHWDNNTSRNWCTNKPGLHAEENFLQIFNEKIDIKQDTPCSITWFLSWSPCYPCSQAIIKFLEAHPNVSLEIKAARLYMHQIDCNKEGLRNLGRNRVSIMNLPDYRHCWTTFVVPRGANEDYWPQDFLPAITNYSRELDSILQD

SEQ ID NO: 107 - protein, 230 aa, synthetic construct
  REGION 1..230: note = pYY-BEM3.41; tr|C7AGG3|C7AGG3_HORSE polypeptide sequence
MDPQAPTQRGGLGQAYQGGDYVQAPGNGNTQHLLSEDVFKKQFGNQRRVTKPYYRRKTYVCYQLKLLRGPTIAKGYFRNKKKRHAEIRFIDKINSLGLDQDQSYEITCYVTWSPCATCACKLIKFTRKFPNLSLRIFVSRLYYHWFRQNQQGLRQLWASSIPVVVMGYQEFADCWENFADNRGNPFQSWEKLTEYSKGIKRRLQKILEPLNLNGLEDAMGNLKLGSVDLG

SEQ ID NO: 108 - protein, 197 aa, synthetic construct
  REGION 1..197: note = pYY-BEM3.42; tr|A0A250YMK7|A0A250YMK7_CASCN polypeptide sequence
MSLLKEDIFLYQFNNQQQVQKPYFRRRTYLCYQLEQPNGSRPQWPAKGCLQNKKGHHAEIRFIKRIHSMGLEQDQDYQITCYITWSPCLACACALAELKNHFPRLTLRIFASRLYFHWIRKFQMGLQHLYKSGVLVAVMSLPEFTDCWEKFVNHRQVFFTPWDKLEEHSRSIQRRLRRILQSWDVDDLTDDFRNLRL

SEQ ID NO: 109 - protein, 189 aa, synthetic construct
  REGION 1..189: note = pYY-BEM3.43; tr|B7T160|B7T160_SHEEP polypeptide sequence
MPWISDHVARLDPETFYFQFHNLLYAYGRNCSYICYRVKTWKHRSPVSFDWGVFHNQVYAGTHCHSERRFLSWFCAKKLRPDECYHITWFMSWSPCMKCAELVAGFLGMYQNVTLSIFTARLYYFQKPQYRKGLLRLSDQGACVDIMSYQEFKYCWKKFVYSQRRPFRPWKKLKRNYQLLAAELEDILG

SEQ ID NO: 110 - protein, 541 aa, synthetic construct
  REGION 1..541: note = pYY-BEM4.1; tr|A0A182D0J1|A0A182D0J1_BLAVI polypeptide sequence
MTNPESPPQAPCDFNEDALLNREPLRGSPIKFVSPVDYPDLVFALAGPVGVDIDYIQQSISDCLKSFDYSTEFIRITEIMQDIKCSKTIDCTDMLKEYQSKIEYANELRRAYRAKDLLAALTISAISKLREQIKERDEATNKSNIQPSRRKLAWVVRQLKTPEEVRLLRAVYGKQFVLVSIYSSPQRREDFLISKIKIKSRGTIDNNTSSEGAQRLIERDSKEDNEYGQNLSGTFCLGDIFVDSNNKESAIVSIDRFLNAFFGSNEISPTRDEYGMYLAKTASLRSCDLSRQVGAAIFSKTGEIISLGSNEVPKAGGGTYWTGDNADSRDIRLGHDPNEINKVEIFAEIISRLLEDKLLSNDLLNKDAASIVTILLSKNEGKRYKDLRVMDIIEFGRIIHAEMSAICDAARNGRAIIGATLFCTTFPCHLCAKHIVASGIGRIVYLEPYPKSYAKKLHSDSIQVEDHSDSEKVSFEPFIGISPSRYRELFEGGRRKDPFGEALKWKNDPRKPVIDVVVPPHFEAEKLVIAQLGKLIVSGTG

SEQ ID NO: 111 - protein, 330 aa, synthetic construct
  REGION 1..330: note = pYY-BEM4.2; tr|A0A2D6EXD2|A0A2D6EXD2_9ARCH polypeptide sequence
MIIGLVGTIGAGKQTIIDYLQEKYGYNALSCSDVLREILKKQGKPVTRDNLREIGNKTREEGGNGAIAKILLEKLRNNWKANYIVDSLRHPDEVSVLRTSPLFHLVAVDADLRIRFERVKARKREEEPTTLPAFVERDQKEMFGTGNEQRIRETMELADELVLNNGTVEELKQRIDDLNLVSDERLRPSWDDYFMRLARLAAQRSNCMSRKVGAIITKDRRVIATGYNGTPRGVKNCNEGGCERCNSAVAKGTAISECLCLHGEENAIIEAGRVRSEGATIYTSFLPCLWCTKMIIQAGLKEVVFSEVYDLHEASIKLFETSGVLIRRLK

SEQ ID NO: 112 - protein, 367 aa, synthetic construct
  REGION 1..367: note = pYY-BEM4.3; tr|F7YVM7|F7YVM7_9THEM polypeptide sequence
MNEFKYMSLALKLAKKGKYTTSPNPMVGAVIVKDGKILATGYHKKAGQPHAEINALSKLNFQAQNCEMYVTLEPCSHYGRTPPCADAIIRSGIRKVVIATLDPNPLVNGKGVEKLKNAGIEVVCGVLEEKAKKLNEKFFKYITTKIPFVALKIAQTLDGKIALKNGESKWITSEKSREYVHKLRMEYDAVLTGIGTILKDDPQLNVRLKKVYKQPLRIILDSKLKIPLSAKVLEDPSKVIILTTALADKEKLEELRSKGVEVIITNEKNGIVDLESALKILGEKKITSVMVEAGPTLLTSFLKESLFDKIYLFIAPKIFGADSKSVFSELGLEDISKSQKFSLESVKKIGEDLLLELYPKQLKKLEE

SEQ ID NO: 113 - protein, 449 aa, synthetic construct
  REGION 1..449: note = pYY-BEM4.4; tr|A0A3M6UNF1|A0A3M6UNF1_9CNID polypeptide sequence
MEEKSELENELMRSTSPKPSVPNGSKGNECEQRETRITKENLYMVLALWMEEFPVVEQTSSAKRLNKVGVVFVLPTDRVLAADCSRDGVHGVARVMVNHCGKLEGCKVFVSRKPCSLCAKLLVQSKVSRVFYLPIEPESENKGEIARADNLFKNSSVGQSVFVPCVEQKVLDKLEDKLPKEIITPDDISECRDNLLKKCGWSAEWFARAQASLPWPCFEGKMKSQVDNDFKSLIKWIAVVKAPMDKGVAFPKVKLTSDSRVVPDCDADNFPDSKTAYHMMIFAKMLARQTDDPKTGVGAVIVRGKVPDIVSLGWNGFPSKALYGEFPRASDDDRALQKKFPYVIHAEQNALMVRNVKDLTDGILFVTKPPCDECAPMIKLSGVKTIVIGEKIEKSRGGELSYNLIKEYIKEGIMTCYQMEATKTKAKRLASDPETRKRLKSSCSNSNDV

SEQ ID NO: 114 - protein, 414 aa, synthetic construct
  REGION 1..414: note = pYY-BEM4.5; tr|A0A2G3K826|A0A2G3K826_9BURK polypeptide sequence
MTKIIDDVNTAAAAVLDQATAAANQTTFAVGGVMVNNQTGEVISAIHNNVIIPLSNNVSFTFDPTAHGERQLVYWYYANKEALKLPEPNQITVITSLDPCAMCTGALLTAGFNVGVVAIDTYAGINCAQNFQFATLPANLRTKAQKNFGYYASGAANFKPLTRSYVGGPSVAFKNGVVTPANLRDCGTVFTQSVDTVRNTSNSTGLAPSQMSNPAELPSNSAILQAYRAIYKKAFTIKIDNPRLPDAQILTELKAVLADAPNARNAVAFIDPFGNLVLCMADAFNTSPVHAAFMNVTQEYAKTRWDLMNKYAQASTTDNPALYLTHPKYGTFVYLYAPDPDDSITIMSLGAYGSTMEGPIPNMFPSNLQFYYPPRNGAQFSELVPVVNELPPFYTQNVNISLMQVPGVTQAPTK

SEQ ID NO: 115 - protein, 308 aa, synthetic construct
  REGION 1..308: note = pYY-BEM4.6; tr|K1ZCJ4|K1ZCJ4_9BACT polypeptide sequence
MSSRAKKNRSTNLKKSIGQKSIENKPTDQKKDQVLVAYVPVIHEGYRRFFRHFPAVKELWLISQELSHELRSLQKDIRALKASETKKLLQTWGQFQKIKLLTPSSLAILQKTTTQLVFPDEEISHHLVEKYFAQNRVLFASFFLRWDKKSSLKKHDLQEYSEISNKEFDQMMIAIAQQEADKSDDWWRQVGGLIFKDETILLLAHNQHTPTEAEAYFAGDPRADFHQGEYLKISTAIHAEAYLIAQAAKQGISLEGADLYVTTFPCPVCAKQVAYSGIKRVFFREGYSLLDGETILKANGVKLIRVTV

SEQ ID NO: 116 - protein, 615 aa, synthetic construct
  REGION 1..615: note = pYY-BEM4.7; tr|A0A1G3PNQ8|A0A1G3PNQ8_9SPIR polypeptide sequence
MRDLPLLVLGLTGPMGAGCTRFARDISKMEPGKVIKKQGLLDQVAHEISELSKKASEIRLQCISNGKNSELAELKRLNRRLNAKLAERACLHVIAKSSLPEPLFISLNTIVIKIAVDSITAPEFAEWAKNHAKVADLLKWLRTQWESELTLYETWGQDAGRFSQDELEKMDAMFAEFERIGDEILKEDFETYFGKRNNDFSIRMFSENIRLSGNPFRPAENGGGGGKYDEPSMVMIARETDRYIRFYRTRSDQKRSHFFIIDEIKNPREAEYFRARHQNFFLVSIFSSSEIRASRMRRGLGHDAGVSDADFQHLFRELDSRDWGADDFDAHGLHRQNIYRCFNLADIAINNDVEDERFSEVLFNKFIRYYALMLSPGCVQPTPQETYMHLAYSLSLRSTCISRQVGAVITDLEDRILSLGWNEVPEGQIGCGLKVKKDYTDKENPLFEMEIWDNVITAEDLAVWDDEDSICVKDILSRIEIKTKLKSVSLTPEERADVLKALRIKRLEYSRSLHAEENAILQVASRGGVGLKDGTIYVTTFPCELCSKKIYQVGISKIYYTEPYPNSISEKVILKDGIRNIKILQFEGVKSYSYFKLFKPGFDKKDAQMLEGRGI

SEQ ID NO: 117 - protein, 291 aa, synthetic construct
  REGION 1..291: note = pYY-BEM4.8; tr|A0A1G0PGF4|A0A1G0PGF4_9BACT polypeptide sequence
MKHNNQLRKEIEKLLGQNSIIKNDELKKLQKEYKIETDELLISFLPYAAEFAKVPISKYKVGAVVLGKSGNIYFGSNMEFEAGALSATVHAEQSAVNNAWLNGETGINKIAVTAAPCGYCRQFLNELTTAKQLHVLLKDKNLEAAKVFKLTELLPEAFGPRDLEIEGGLMKVENHKLKIENINDELINAALEAANKSYAPYSKNYSGVSIQLSDGTIFSGRYSENAAYNPSLLPFQSALAFMNMNTKKGSNNKIVDAVLVEAVSNISQKDAAGTLLNSISKTKLRYYKIKN

SEQ ID NO: 118 - protein, 398 aa, synthetic construct
  REGION 1..398: note = pYY-BEM4.9; tr|A0A0P4WGY5|A0A0P4WGY5_9EUCA polypeptide sequence
MEENSSATSQPKCASRTKQGGNDLSTDMSNLSVGETKRTDFLPWDDYFMAVAFLSAMRSKDPSSQVGACIVNADKKIVGIGYNGMPIGCSDDELPWNKESLDPLQTKYMYVCHAEMNAIMNKNSSDLAGCCVYVALFPCNECAKLVIQAGIREVVFFSDKHQQKPETVASKKMLNMAGVAYRQYTPSQSKIELNLSLKEQEKSEPTADITQSSERDQNSKRKDYLSWEEYFMAMAHLSALRSKDPITQVGACIVNSKKKIVGIGYNGMPLGCNDDLMPWGNSSSNKLETKYMYVCHAGVNAIMNKNSCDVSGCTLYVALFPCNECAKVIIQAGIKTIIYASDTNKDQASILASKKMLDMAGIKYRADNLSQRKIVIDFKTIDWNSRFMNDHQNDPTCL

SEQ ID NO: 119 - protein, 259 aa, synthetic construct
  REGION 1..259: note = pYY-BEM4.10; tr|A0A3D8IG27|A0A3D8IG27_9HELI polypeptide sequence
MRKNILYFILTLFFLSGLYATSLPEDNVVSGVIYEKIDTVSAEVDHIYPMLALAIVYKDWQEKNMLNKQGHNIGLVIVDENNMPVFWVRNSVHATHNGTQHGEVRLVSNLLNCEGFNKYLDKYTLYTTLEPCIMCAGMLSMVQIPKVVYAQKDLSCGNTQEIISTAKYPRYYKAFTVENGYKKDLEECFEQYKICKNDSITDFLVNDSAKEIFRKASNDLQDYKVKFKENRRVIKVAQEFLQNIQTKDNLDVLQCPKNM

SEQ ID NO: 120 - protein, 256 aa, synthetic construct
  REGION 1..256: note = pYY-BEM4.11; tr|A0A351C8C4|A0A351C8C4_9BACT polypeptide sequence
MNELTKQSEHLRNEALRIATRSYVPYTGQQEGVIILLENGDLIPGVRVENASFQLTIPALQNALSTMYALQRTDISMIVSSIPFTDSDLAYTGGMAEIAWEMVGASLLLVAGAHIPEAGTFIDPARGENLLDVSREAALNAFIPESDFPVGSAIQTSDDVVIDGCNVEHSDWSKIICAERNVLSTARSYGLGQITTIYVSCPKEPGGTPCGACRQVIVELAPDATVWMDRGNQEPIAMKATKLLPGHFTGNVLKKQ

SEQ ID NO: 121 - protein, 301 aa, synthetic construct
  REGION 1..301: note = pYY-BEM4.12; tr|A0A1G6V2K7|A0A1G6V2K7_PEPNI polypeptide sequence
MPIVRVNEIGARLPEDWEALETAIWQAYVSREDLPDAGELDLTLVDDATIQELNKTHRQLDKSTDVLSFPMYDDRDDLAADVQAGLPVILGDIMISVPTAERQAQAYGHSFKREMAYLLVHGLLHIAGYDHMSAEEKSAMRRAEEAILADVDVPRDTAPSKTAAVLDEADVQALIDAARAARLQAYAPYSGYAVGAALLAADGRRFCGVNVENASYGATCCAERTALFAAVTAGARDFIALALVTEGDEPAPPCGLCRQALAEFSPDLAIYLAGPTGETYRRTSLAALFPEAFSLSTKESV

SEQ ID NO: 122 - protein, 528 aa, synthetic construct
  REGION 1..528: note = pYY-BEM4.13; tr|F2NP91|F2NP91_MARHT polypeptide sequence
MPVMETHALEARFKEALARLCPEGRLLAAVSGGGDSVALLYLLKAAGRDTIVAHLDHALRPDSAADAAFVEKLAQRLGFPLETEHVDVRALAHRKRINLEAAAREVRYAFLARVARRWKARCILTAHTLDDNAETVLLQILRGAGRGLGIRPLQRRVARPLLEFSRAELRAYLEARGARWLEDPTNRSLELDRNYLRHAVLPRITARFPHALEALARFSQAQQADDWALEALSARHLIPDRRWPVPAYRALPLERAPEALRRRAIRGVLEALGVRPEARLVADVEAALGGRAQTLPGGVVVRRQRGTLFFIPPTVRFPKVQPPAGLEARPPRPGDYLVFPYGRKRLVDFLNERGVPRELKRRWPVGAVGAEVRWVYGLWPEPDEDRYMRRALVLARAAARQGEVPIGAVLVRDGAVLAEAANAVEASRDATAHAELLALRTALRRVGEKVLPGATLYVTLEPCPMCYGAILEARVARVVYGVENLKAGAFTVHGLEPRVALEAGRVEGECAKVLKDFFARLRPGRDGA

SEQ ID NO: 123 - protein, 226 aa, synthetic construct
  REGION 1..226: note = pYY-BEM4.14; tr|A0A316TX77|A0A316TX77_9BACT polypeptide sequence
MINGYTPYSGNQNTCYVKGESGTFYPGVRIENVSYPLTISSVQAAVCSCLANSDNPVEYYTGDHQPELLQVWADEYDMKPGGKLPDSPLKLFDPLVPSIPDIKKELDVLTEKSVTPNSGFPVSALLQTEKGYIRGVNIELSSWALGLCAERVAISRALTAGYTQFKSIHIYAPEADFVSPCGACRQVLLEVMPDADTELYHGDGTLSKHIVSDLLPFGFTSHKLKK

SEQ ID NO: 124 - protein, 321 aa, synthetic construct
  REGION 1..321: note = pYY-BEM4.15; tr|R6VYG3|R6VYG3_9FIRM polypeptide sequence
MIHKGTQTIETKRLILRAFTPDDAEAAFENWMSDPKVTEFLRWKTHADISDSRKIVNEWANGSADPEFYQWAIVPKDVNEPIGTISVVDRNDALGIFHIGYCIGSKWWHKGITSEAFSAVIHFLFEEVGANRIESQHDPENIHSGDVMKKCGLTFEGTLRQADFNNRGIVDACVYSILQSEWQNNTSVWQRLYNAALTVQNDRVVSPFIDAGGVAAALMTKKGNIYTGICIDTASTLGMCAERNAVANMLTNGESRIDKIVAVMPDGKVGAPCGACREYMMQLDRDSGDIEILLDLETEKTVRLKDLIPDWWGAERFGDTE

SEQ ID NO: 125 - protein, 229 aa, synthetic construct
  REGION 1..229: note = pYY-BEM4.16; tr|A0A3C1HZ18|A0A3C1HZ18_9BACI polypeptide sequence
MGDIMENWNELSEPWKRCFLQAWKAYCHGSIPIGAVLVDSEGEIFLEGRNRVHELTAPEGQLCDCRIAHAEMNVLVQVKTSDYEKLSGATIYSTMEPCIQCFGAIILSRIKNISFAAIDDKLAGATTLEDRHGFIKSRNLNIAGPFSHLGEIQIILRTDFLLRIFDSEYADPLIAAHEKDYPIGVALGRHYHRNNRLQVAKKETIPFGELFNEFSFDIKRAREGYTLGK

SEQ ID NO: 126 - protein, 205 aa, synthetic construct
  REGION 1..205: note = pYY-BEM4.17; tr|A0A1M6KV24|A0A1M6KV24_9BACT polypeptide sequence
MEASQQNILLKIEGKGPVAEINFTVTLPEWLVEQVQSGSTVFLTQKEKMRFVLELARKNVAQETGGPFAAAVFSLESGELVSAGVNVVVESRCSSAHAEVVALSLAQKAVDSHDLGAAGLPRMVLVSSAEPCAMCMGAIPWSGVKQVICGARDEDVRSVGFDEGAKPLEWVEDFAERGIEVIRDVLREEATEVLWDYRERGGEIY

SEQ ID NO: 127 - protein, 207 aa, synthetic construct
  REGION 1..207: note = pYY-BEM4.18; tr|A0A2U0T9B4|A0A2U0T9B4_9RHIZ polypeptide sequence
METAELISRLLDVIEKDIAPVTAKGVARGNKLFGAAILKKSDLAVIVAETNNEIENPLWHGEMQAIKRFFELPADQRPATRDCLFLATHEPCSLCLSGITWSGFDNFYYLFSHQDSRDGFAIPYDIQILKSVYAVPEPETGTVSPARDLYNRSNDFWTSHGLQDMIAGLARSNREALLARIDDLNALYAELSERYQRDKGGKGIPLP

SEQ ID NO: 128 - protein, 231 aa, synthetic construct
  REGION 1..231: note = pYY-BEM4.19; tr|A0A2K9PN08|A0A2K9PN08_9FLAO polypeptide sequence
MSDKKESKIKISKTSESIELDEIHSLLSYSIVQKFWENDDRNGRGYNVGVILVDENKNIVDWDINSVNKTENSTQHGEMRLISRYLDKDELYSLKGYTMYPTLEPCAMCAGMMTMTNVYRTVNGQMDYFYSKALERLSIDTRECGGYPPYPRTVISEISPSSISTRLDAEYKQYTNAGNKPIITKFLSTYKAKTIYDDAFNQFINFKCKFPENKTKYENAIKFYNSLPESI

SEQ ID NO: 129 - protein, 330 aa, synthetic construct
  REGION 1..330: note = pYY-BEM4.20; tr|F4PWM7|F4PWM7_CAVFA polypeptide sequence
MRFSLSLLFVILSVLLAGVLACKDPYNPETVDYGQCASATKANYEVRSDSKVLTPADLPADELAVHESRMRHIIDIARVNNKKFVSSIYFPNGTLACIGINTGKPNMIAHGEIVAIQNCTEIHGISMYTNYSIYTTGEPCSMCASAILWSRFKTVVWSTYNSDLYCKICMSNIPIDSSYIFSRAYGLGIEAPVAIGGVVKAEGDAWFGTYCNRPTSIYYIAPKCACQDPAKVSPLKFTQTRTTVWVEGGDKVVTQWNAIISNPSNSTIVDPPIVISPSVVFKGAPWGISAASEPNTYKLSYNKVLFPGQTFSFGYSVYGLEEVAFTALEA

SEQ ID NO: 130 - protein, 193 aa, synthetic construct
  REGION 1..193: note = pYY-BEM4.21; tr|U7QZM1|U7QZM1_PHOTE polypeptide sequence
MNKTRRKLLATLGIMSISMSFIAQAGEKKTQVINNILSKQEITEHEKYMREAIKEAIKNPKHPFGAVIVNRNNGEILSRGVNTGRNNPILHGEIQAINHYITQYGNQGWENVALYTTGEPCSMCMSALVWIGIREVIWATSISVIRNSGIRQIDISAHEIAERASSFYNPITLVGGILANETDKLFLERKRGN

SEQ ID NO: 131 - protein, 319 aa, synthetic construct
  REGION 1..319: note = pYY-BEM4.22; tr|A0A081CH48|A0A081CH48_PSEA2 polypeptide sequence
MASRRHLLATQVTGNHRKLSLWHLRGWLSPYTKLVDAVYFLTTNSFYHSLQTPPVQSITMLLSSIITSLALAAQASAYREGLHPEFQSGLSINSVPATDRDHWMRLANSAIYYPPVSHPCPQAPFGTAIVNTTSNELICAIANRVGSTGDPTQHGEITAIQHCTNVMRKKGLSPQEIIAAWKQLSLYTNAEPCTMCLSAIRWAGFKEVIYGTSVGTISENGRNQIYIPSNLVLEKSYSFGHATLMLGNILTHETDPFFQHQFNESAPCPVGCERTQVGEARVKTCEPVPNWQKLVRLEYSEDSRVGSEPVAHTPLHLEL

SEQ ID NO: 132 - protein, 203 aa, synthetic construct
  REGION 1..203: note = pYY-BEM4.23; tr|A0A3D3HMU1|A0A3D3HMU1_9GAMM polypeptide sequence
MDYSDAILGAITSIRRNSKQPGVNVTDNVTDSSTQYNNDEYWMRRALALAREAGEAGEIPVGAVLVKDNQQVAGGFNQPIRSHDPAAHAEILTLREAGAVLGNYRLIDTTLYVTLEPCMMCAGALVHSRIKRLVFGAAEPKTGAAGSFIDLLTLPRLNHYMEVTGGVLGEECSVLLSDFFRRRRAEKKALKRQNSESGSDSAS

SEQ ID NO: 133 - protein, 270 aa, synthetic construct
  REGION 1..270: note = pYY-BEM4.24; tr|A0A1N5WT13|A0A1N5WT13_9ACTN polypeptide sequence
MLEKIERRLVAAAEAVVRSPSTGDAHTVAAAAMDANGDIYSGVNVFHFTGGPCAELVVIGSAAAANAPPLITIVAVGDGDRGVIAPCGRCRQVMLDLHPDVFVIVPTGDGQLAAKPVRELLPFGYVARTGSTAPRVVYFHPRHYDTISSGLKTATVRFQDSVQTGPAVFVFDDGESIRRLDAVVEKVESRRLDHLTEEDAHHEALPDSDALRDAIKTQYPMLGDGDVVDVATFRLTAISAPDPDPRSSYPPAVSRCNPAGPRADLLVGQS

SEQ ID NO: 134 - protein, 257 aa, synthetic construct
  REGION 1..257: note = pYY-BEM4.25; tr|X0SAC5|X0SAC5_9ZZZZ polypeptide sequence
MTKDGRVIASAHDTEVTDQDSTAHAEINAIRKASKIYRKDLTGCLIISTHEPCPMCTGSIIWSNISKVVYGVSIRDSIKAGRDMINLSCKEIIKKPNAEINIYDGILKKECLKLYNNDTRKLVKKFRKYEWINIEENLLNKRMQWFENNKTMIRKLKGNDLEKAYHLILMKIGIKRSEAPIVKKSESKIIFHSKNYCPSLEACIILDLDTREVCKEIYERPTEELIRRLNSKLRFTRNYDCIRPYSDYCEEIIILEK

SEQ ID NO: 135 - protein, 154 aa, synthetic construct
  REGION 1..154: note = pYY-BEM4.26; tr|A0A3B8IC10|A0A3B8IC10_9BACT polypeptide sequence
MPSHEDFIHQCLELGKEALLQGNPPVGSVIVWQDQVIGRGIENGRSSGDITQHAELLALQEAVATGQRDKLKEAIIYSTHEPCVMCAYPIRQYKIPTVVYSVAVPELGGHTSSWHLLTTEDVPKWGKAPKIITGISAEEVEALNAAFQDSLKKG

SEQ ID NO: 136 - protein, 180 aa, synthetic construct
  REGION 1..180: note = pYY-BEM4.27; tr|A0A2N9P8B9|A0A2N9P8B9_9FLAO polypeptide sequence
MFIFKLISPPVSIEVYQDKIIQKLYICFMENIFTDEYFMKKALQEAETAFQQGEIPVGAVIVIDNRIIARSHNLTEMLNDVTAHAEMQAITASANFLGGKYLKDCTLYVTLEPCQMCAGALYWSQISKIVYGATDEQRGYRAMGAQLHPKTKVISGIMQNECTHLMKDFFKQRRSKSTKD

SEQ ID NO: 137 - protein, 178 aa, synthetic construct
  REGION 1..178: note = pYY-BEM4.28; tr|K1KX30|K1KX30_9BACT polypeptide sequence
MVKNPVNNNELYFGKHSEIPMNEEQKAYMKMAVDLSRSGMESGKGGPFGCVIVKDGKVIGIGSNSVLETNDPTAHAEIVAIRDACRNLGHFQLDGCEVYTSCEPCPMCLGAIYWARPSKVFFANDKRDAAEAGFDDDFIYQELELPYEKRKIPFEQGMQDTAKEVFQEWILKEDKTLY

SEQ ID NO: 138 - protein, 196 aa, synthetic construct
  REGION 1..196: note = pYY-BEM4.29; tr|R4XI84|R4XI84_TAPDE polypeptide sequence
MSSEIEPPSTDVHKHAVAEAADESGAADAFMQIALQQAETALLNKEVPVGCVFVHQPTGTVLATGANQTNASLNGTLHAEFVAIESILRDHPPSIFRESDLYVTVEPCVMCASALRQLQVRKVYFGCGNDRFGGCGSVFSIHSDASKTGDAAYMVESGIFRKEAIMLLRRFYLLQNESAPKPALKSTRVLKEHFDE

SEQ ID NO: 139 - protein, 212 aa, synthetic construct
  REGION 1..212: note = pYY-BEM4.30; tr|A0A239CVF7|A0A239CVF7_9DELT polypeptide sequence
MSPASKKHFPSLFSFLLLTIGLICGTAHAQPQGHTADDTAATLANASLKEHEPFIRRCYQLAIDAGKKGNHPFGALLVHKGKIVLEAENTVLTDNDFTNHAEMNLIAEAARTLSRQIIPEATVYTSCAPCAMCTATLAMAGFTRIVYGVSHDALNKRFGLKGKSVSCPALFKTMGMELEFVGPVLEKEGLRVFDFWPEKDPHAQMLKKQARK

SEQ ID NO: 140 - protein, 320 aa, synthetic construct
  REGION 1..320: note = pYY-BEM4.31; tr|A0A1Q3NME1|A0A1Q3NME1_9BACT polypeptide sequence
MTEFNYDWAKLAFSSKRPLTNLKATFIIAPREISEKRFTQLLKEYLPKGDILLGISKEDYVEGLEGQPQFAMLQQKTLQKLIDKVNDASAHKVYTLRYFQRELPAIIEKLTPPRVVGIHGSWHHSFHTLPIYYLLSEKRIPYQLVAAFSDEDEARAYEVATDKKIVRPTLEGSFDDTTVLQLTDEVAKSSYDYGFQTGAILAEKVNGVYQPVAAGFNKVVPYQTYALLNGASRETNFSPANDMNHYDTIHAEMQILVEAAKQGISLKDKTLFVNLMPCPSCARTLSQTELSEIVYRIDHSGGYAVDLLTKVGKDIRRIVY

SEQ ID NO: 141 - protein, 180 aa, synthetic construct
  REGION 1..180: note = pYY-BEM4.32; tr|A0A2G6N4N7|A0A2G6N4N7_9DELT polypeptide sequence
MKERTVSYSDRHFMAEALEMAESALTQGEFPVGCVIADGTAVVARGHRTGTTAGAVNEIDHAEINALRHLGLAGEHLDRTDLTIYSTMEPCLMCFAAIVLSGINRIVYAYEDVMGGGTGCDLTGLPPLYRDAPLTLVAGVRRRASLNLFRRFFTDPENGYWAGSLLSRYTLNQTKDSHRL

SEQ ID NO: 142 - protein, 156 aa, synthetic construct
  REGION 1..156: note = pYY-BEM4.33; tr|A0A0G0RBB8|A0A0G0RBB8_9BACT polypeptide sequence
MQSVQYNKLTHLQRRALDEAEQVLENSYNPYSHFYVGACLISEDEQLIAGTNFENAAYGSAICAERAAVLRANAMSIRRFRGIAIIARGEDFNTTEVTGPCGSCRQVLYEISQVSGCDLQVILATSKKDKIVITTIRELLPLAFGPLDLGVDIGKY

SEQ ID NO: 143 - protein, 217 aa, synthetic construct
  REGION 1..217: note = pYY-BEM4.34; tr|A0A327L2Q5|A0A327L2Q5_9RHIZ polypeptide sequence
MVTSRDGEDEAMMARCVALSRIAVGKGEYPFGAVVAREGRIVAEAINRTIRDGDVSRHAEVIALARAQKAIGRRELRECSLYSNVEPCAMCSYCIREAWVGRVVYALGSPVMGGVSKWNILRDDGLSGRMPQVFDAAPEVVSGVLVEQAQAAWRDWSPLAWEMITLRGLMTDPSARPECRTRAARPRSLWHHLVALIERPPRPYVDPTSAAEGHADL

SEQ ID NO: 144 - protein, 162 aa, synthetic construct
  REGION 1..162: note = pYY-BEM4.35; tr|S2DR30|S2DR30_9BACT polypeptide sequence
MKMKKKIEITVSLEVIQKSEWSKEDRSLIERAIHAVEHAHAPYSNFMVGTALLLDNGQIFSANNQENVSFPVGICAERAVLSYAMGNFPNNRPVKLAVVAKRRSDSTWATVTPCGLCRQTINEYEVKFGHPIEILMLNPGEEILKASGIDQLLPFRFNDLNS

SEQ ID NO: 145 - protein, 153 aa, synthetic construct
  REGION 1..153: note = pYY-BEM4.36; tr|A0A369QGF1|A0A369QGF1_9BACT polypeptide sequence
MEEHEKWMHWCLNLAQQALQQGDFPVGAVVVQKGKLIGQGVEAGQLKKDITCHAEMEAIRDARQTINTADLQNCILYSTHEPCIMCSYVIRHHKISRVVVGTTVPEVGGSSSAYPLLSAPDISIWVAPPHLVTGVLAEACQALSQAYKQKFKK

SEQ ID NO: 146 - protein, 159 aa, synthetic construct
  REGION 1..159: note = pYY-BEM4.37; tr|A0A1W6X4U4|A0A1W6X4U4_9RHIZ polypeptide sequence
MTNPSRQERWDRRFLELAKVFGTWSKDRSAGTGCVIVGPDRLLRASGYNGFARGIDDEVPERHERPAKYSWTEHAERNAIYNAAKLGISLDGCTAYVNWFPCIDCARAIVQAGIVRLVGLHPDHADQRWGSEFKFATEMLRESGIEIILYDIPELAARK

SEQ ID NO: 147 - protein, 490 aa, synthetic construct
  REGION 1..490: note = pYY-BEM4.38; tr|A0A238BW09|A0A238BW09_9BILA polypeptide sequence
MEEMARKIRTKAKKANSYCNTMTFLISKASIVLLKAECKRIELTVVIFRFLIKMNASEPNNELCDMTVIKSMLKITHVIFDLDGLLIDTEVVFSKVNQCLLSKYNKKFTPHLRGLVTGMPKKAAVTYILEHEKLSAKVDVDEYCKKYDEMAEEMLPKCSLMPGVMKLVRHLKTHSIPMAICTGATKKEFEIKTRYHKELLDLISLRVLSGDDPAVKRGKPAPDPFLVTMDRFKQKPEKAENVLVFEDAANGVCAAIAAGMNVIMVPDLTYMKIPEGLQNKINSFSDNLIISNDLNVALMSLKKELSEEEVHFLNRAFEIAVDAVLNNEVPVGCVFVFEGQEVAFGRNDVNRTKNPTYHAEMVALKMMKQWCMDNGRDLEEIMRRTTLYVTLEPCIMCASALYHLRLKKILYGAANERFGGLVSVGTREKYGAKHFIEIMPNLSVDRAVKLLKEFYEKQNPFCPEEKRKVKKPKKSGNNNDNSDDAVALNV

SEQ ID NO: 148 - protein, 159 aa, synthetic construct
  REGION 1..159: note = pYY-BEM4.39; tr|A0A1J5H6Z0|A0A1J5H6Z0_9BACT polypeptide sequence
MAYQPSEKFMQMAIDKTREGVLSGQTPFGACIVKDGKVVACEHNTVWQDTDITSHGEVHTIRAACKAIGSIDLSGCILYSTCEPCPMCFSAIHWARIDTVVYGAFIADAQDAGFNELTISNEKMKEFGGSPVNFISGFMRDENVALFKLWKEQGANNVY

SEQ ID NO: 149 - protein, 168 aa, synthetic construct
  REGION 1..168: note = pYY-BEM4.40; tr|A0A3C2D945|A0A3C2D945_9BACT polypeptide sequence
MKTTEIRIIVHEYQNIDELTENDQYLLHEARRITEFAYAPYSGFHVGAAILLGNGMIVKGNNQENSAYPSGLCAERVALFYANANYPDSEVKTIAISAAKNGILVNDPIKPCGGCRQTLSEAEVRFGSPIRIILDGQDSILVLHGVESLLPLSFSKKDLASPLAATGR

SEQ ID NO: 150 - protein, 214 aa, synthetic construct
  REGION 1..214: note = pYY-BEM4.41; tr|A0A1I7EYS3|A0A1I7EYS3_9BURK polypeptide sequence
MKFKLDPSRPPDEDDYYLGVALAVRRKANCTGNRVAAVIVKNKRVIATGYNGVPEDMPNCLDGGCLRCSNPGGQFKSGTRYDLCICVHAEQNALLTAARFGISVEGAHLYTTMQPCFGCAKEILQAKIEKVFYLHPWVPTDVDPVMDAAMKAEYAKIIGKLKVKKLDFDDPVATWAVTTMRQAALASDKNPDKKTPPKTAKKKVAKKKSRTSPR

SEQ ID NO: 151 - protein, 155 aa, synthetic construct
  REGION 1..155: note = pYY-BEM4.42; tr|H8GQX8|H8GQX8_METAL polypeptide sequence
MNHEHFMRRAIELARQAPQYPFGAVIVRRDDGQCVGQGFNRSDLNPTYHGEMVAINDCAVRHCAEDWRGFDLYTTAEPCAMCQGAIEWAGIGRVFYGTSIPYLQKLGWWQIDLRAAEVSARAVFRDTLIVGGILETECNALFAAARRGCFGTGSE

SEQ ID NO: 152 - protein, 156 aa, synthetic construct
  REGION 1..156: note = pYY-BEM4.43; tr|A0A0S8HZN3|A0A0S8HZN3_9CHLR polypeptide sequence
MDEHDIRFLRASFDVARNARKNGNHPFGALLVDEHGRIVMEAENTVITAKDCTGHAETNLMREASSKYDSDFLANCTIYTSTEPCPMCAGAIFWSNVRRVVYGLSEESLYEIAGRGSEEVLFLSCREIFERGKKLIEVIGPLLEDEAREVHMGFWR

SEQ ID NO: 153 - protein, 193 aa, synthetic construct
  REGION 1..193: note = pYY-BEM4.44; tr|E3SF31|E3SF31_9CAUD polypeptide sequence
MKPTTVLQIAYLVSQESKCCSWKVGAVIEKNGRIISTGYNGSPAGGVNCCEHAEEQGWLLNKPKPVLIPGHKSECVRFSQVDRFVLAKAHREAHSAWSKNNEIHAELNAILFAARMGSSIEGATMYVTLSPCPDCAKAISQSGIKKLVYCETYDKNIPGWDDILKNAGIEVFNVPKRSLDKLNWENINEFCGE

SEQ ID NO: 154 - protein, 330 aa, synthetic construct
  REGION 1..330: note = pYY-BEM4.45; tr|F8AAC6|F8AAC6_THEID polypeptide sequence
MIRAPWHEYFMLLAKIVALRSGCNSRPSGAVIVKNKRILATGYNGPMPGAWHCTDRGPGYCFRREKGIPDIDKYNFCRATHAEANAIAQAARFGISVEGASLYCTLAPCYVCLKLIASAGIKKVYYEHDYGSRDFERDQFWKEAIKEAGLEKFEQITVSQEVMEQLQEILPYPTSKRRLAPTEFLDEFEDGKKYGVPSIEVLFNKLNYLTRQALKDITFVIEKTTVTEEPEGISFYLSGKMVELSELINTVKKQINADQNFYFLAKHNAIEAKIEILREAENIRLKAFLNECPLESFKRIAESLDYILYQVSNSLSLPTRLELSVNLLRI

SEQ ID NO: 155 - protein, 158 aa, synthetic construct
  REGION 1..158: note = pYY-BEM4.46; tr|A0A2H4ZNK4|A0A2H4ZNK4_9EUKA polypeptide sequence
MKKQLSRKIQEEWMSRLLRNAYDAGTYGEVPIAAVILNESGQCIGWGRNCREKDQNPLGHAEIIALRQASYLKKSWRFNECTMLVTLEPCPMCAGALLQARINHIIYGASDYKRGGFGGVLDLSKNSSAHHKIEITRGVKSIQSCQLLETWFRRRRRV

SEQ ID NO: 156 - protein, 176 aa, synthetic construct
  REGION 1..176: note = pYY-BEM4.47; tr|A0A239N5N1|A0A239N5N1_9PSED polypeptide sequence
MEGRAGIIPFDEGGAAMGPAEEDSPMQHLAYMREALALARANVEAGGRPFGAVLVRDGEVIARAANGTHLDHDPTAHAELLALRAAGRALGSPRLDGCVVYASGHPCPMCLAAMHLSGVSAAYYAYSNADGEPYGLSTAAVYAQMAQPVEWQSLPLQALRPEDEEGLYGFWRERRP

SEQ ID NO: 157 - protein, 199 aa, synthetic construct
  REGION 1..199: note = pYY-BEM4.48; tr|A0A328VTR2|A0A328VTR2_9PSED polypeptide sequence
MHPEHLALLQQAPASTHADDTWARLCCEQALLAVEEGCYAVGALLVDGAGELLCSGRNQVFAPAYASAAHAEMRVLDQLEAEHAQVDRRSLTLYVSLEPCLMCYGRILLAGITRVRYLARDRDGGFALRHGRLPPAWANLASGLSVVQAKADPYWLDLAEHAIGRLQDRQTLRQRVIRAWRGQRTLTDEFSSTKRTHSG

SEQ ID NO: 158 - protein, 402 aa, synthetic construct
  REGION 1..402: note = pYY-BEM4.49; tr|A0A103YG48|A0A103YG48_CYNCS polypeptide sequence
YIRELHASSLRRDEHEIQNPKILVIVDRLSSPSLHVSLSLSLSLVIFPPFIPLNQTPTHMENAKVVEAKDGTIAVASAFSGHQEVVQDRDHKFLTRAVEEAYKGVECGDGGPFGAVVVHKDEVVASCHNMVLKHTDPTAHAEVTAIREACKKLNKIELSDCEIYASCEPCPMCFGAIHLSRIKRLIYGAKAEAAIAIGFDDFIADALRGTGFYQKAHLEIKQADGNGAMIAEQVFEKTKAKFAIDHKFLTRAVEEAYKGVECGDGRPFGALVVHKDEVVVSCHNMVLNYTDPTAHAEITAIREACKKLNRIELSDCEMYSSCEPCPMCFGAIQISRIKRLVYGAKAEASIASGIPIGDFISDALKGTGFHEKANFEIKQADGNGAMIAEQVFERTKAMFPKR

SEQ ID NO: 159 - protein, 195 aa, synthetic construct
  REGION 1..195: note = pYY-BEM4.50; tr|W5M1M8|W5M1M8_LEPOC polypeptide sequence
NSSTRESRVMAQMEINGGASPPKKPGKGQSAADQDMITGLINKALQAKEFAYCPYSNFRVGAALMTNDGRVFTGCNVENACYNLGVCAERTAILKAVSEGYESFRAIAVSSDLQDQFISPCGACRQVMREFGTGWDVFLTKVDGSYVRMTVDELLPMSFGPDDLKKKKVFSLQNGHEVSTQFYTHSPCEAGENNN

SEQ ID NO: 160 - protein, 134 aa, synthetic construct
  REGION 1..134: note = pYY-BEM4.51; tr|A0A3N5YPZ2|A0A3N5YPZ2_9ALTE polypeptide sequence
MSNSETEHIQALVDAAQAAQKQSYSPYSSFQVGAAIFADDGNTYSGCNIENVAYPLGQCAEATAIGMMIMQGAKRIEDIMIASPNDQVCPPCGGCRQKISEFGTAETKIHMVTRSGEVSTVTLGELLPLAFDSL

SEQ ID NO: 161 - protein, 162 aa, synthetic construct
  REGION 1..162: note = pYY-BEM4.52; tr|A0A2A9NC86|A0A2A9NC86_9AGAR polypeptide sequence
MTNSTLSNEDRTRLIQGAFQARKKTYSPYSNFPVGAALLTTDGRIIEGANIENASYGGTICAERTAIVKAVSDGYRHFAGIAVTTKMPTRVSPCGICRQVLREFCSLDMPVLLVPGDYPQRNPVDDDGADKPGVITEGGVRETTLGALLPDSFGPENLPPRA

SEQ ID NO: 162 - protein, 163 aa, synthetic construct
  REGION 1..163: note = pYY-BEM4.53; tr|A0A2D6RD43|A0A2D6RD43_9GAMM polypeptide sequence
MNIENLITENDETLIRRCIELAGESVKNGDKPFGALLAKDGNIIFESSNNAKTKVPYHAEILTLMDAQDKLNTTDLSDYALYSNCEPCPMCSFMIREYKLDKVVFSVHSPYMGGQSRWNILEDDVLTRFKPYFSKPPNVVGGVLESEGKRIFDKVGLWMFGKE

SEQ ID NO: 163 - protein, 204 aa, synthetic construct
  REGION 1..204: note = pYY-BEM4.54; tr|A0A0H3AVL6|A0A0H3AVL6_BRUO2 polypeptide sequence
MHAKGYSQQERRIIPFANRFRFRELCSNKSLHGLRAKFPEQYTKWDPMRKAASITKANSATPMDIALEEAHAAGERGEVPIGAVIVRDGEIIARAGNRTREFNDVTAHAEILTIRQAGEMLGSERLIDCDLYVTLEPCAMCAAAISFARIRRLYYGASDPKGGGIEHGGRFYTQPTCHHAPEIYPGFCEADARKILKDFFREKR

SEQ ID NO: 164 - protein, 165 aa, synthetic construct
  REGION 1..165: note = pYY-BEM4.55; tr|A0A242H531|A0A242H531_9ENTE polypeptide sequence
MFIVKNNIEVIQQQAELDAKFMKQALKLAKDASNNGNEPFGAVLVKNDKVILTGENQIHTESDPTYHAELGIIRDFCTSQKITDLSEYTLYTSCEPCCMCAGAMVWSNLDRMVYGLGHDELAEIAGFNIMIGSEEIFSKSPNRPEVAKGVLKEAAVPVYVDYFQR

SEQ ID NO: 165 - protein, 181 aa, synthetic construct
  REGION 1..181: note = pYY-BEM4.56; tr|A0A2R6XZE2|A0A2R6XZE2_9BACL polypeptide sequence
MSGRISWHEYFMAQAKLIALRATCTRLMVGAVIVRDRRVIAGGYNGSIAGDEHCIDVGCKVRDGHCIRTIHAEQNALMQCAKFGVSTDGAELYVTHFPCLNCTKLLIQAGIRHIYYEVPYRVDPYAIELLEKAGVGTTQITVDLNAYVQVMSKVSTDPALTYVPESKAQKDEYGQSVGKIV

SEQ ID NO: 166 - protein, 173 aa, synthetic construct
  REGION 1..173: note = pYY-BEM4.57; tr|A0A139SHT6|A0A139SHT6_9BACT polypeptide sequence
MSEANASSESLPSRNSPVELIAEAAGKFGRRPTWDEYFMATAVLISTRSSCERLNVGCVIVTAGESHKNRIVAAGYNGHLPGSPHTSRMRDGHEQATVHAEQNAISDAARRGSSVEGCTAYVTHYPCINCAKILASAGIAKICYRLDYHNDPLVKPMLAEAGIEIVQLGEAAS

SEQ ID NO: 167 - protein, 170 aa, synthetic construct
  REGION 1..170: note = pYY-BEM4.58; tr|A0A261DBH2|A0A261DBH2_9RICK polypeptide sequence
MVMKKKLITVKRSTEFNNFFMEEALKQAQFALDKNEIPVGAIIVNRITNKVIAKAHNIVEQTKNPVLHAEIVAINQSCQILSSKNLSDCDMYVTLEPCVMCSGAISFARIGRLFYAANDPKQGAIENGGRFFNSKSCFYRPEIYSGFSAKISENLIKEFFYNVRYQKCNP

SEQ ID NO: 168 - protein, 146 aa, synthetic construct
  REGION 1..146: note = pYY-BEM4.59; tr|A0A2N0XZK6|A0A2N0XZK6_9VIBR polypeptide sequence
MTDNSLHESYMRQAFELSKSALPGCRPNPPVGCVFVKDGEVVSSGFSQPPGNHHAEAGAIAAYTGSYDGLVAYVTLEPCSFQGRTPSCAKALVRVRPEKVYVAILDPDTRNSGAGIKILEDAGIDVEVGLLGEEVASFLNPYLIRN

SEQ ID NO: 169 - protein, 159 aa, synthetic construct
  REGION 1..159: note = pYY-BEM4.60; tr|A0A1V5R0F9|A0A1V5R0F9_9BACT polypeptide sequence
MTKKETTKLHALDDFCMKKALLLAKRAFRADEVPVGALVVDSSNKVIGRGYNQVEKRKSQRAHAEQLAIEQACKKIGDWRLEGCTLYVTLEPCTMCMGLIKLSRIERVVFGAASPLFGYQLDKNRKSQLYKKGVIKIRKGVGKATAAALLKDFFKNKRM

SEQ ID NO: 170 - protein, 167 aa, synthetic construct
  REGION 1..167: note = pYY-BEM4.61; tr|A0A2W0H8Y3|A0A2W0H8Y3_9BACI polypeptide sequence
MKNNGRLDHEYFMTEALQEAKEAGQRGDLPIGAVIVHNGRIIARGSNMRKTAGIKISHAENNAMHNCAPYLMKHASECVIYTTLEPCIMCLTTLVMANIDSIVFAADDKYMNMKPFIDANSYIRDRIHQYKGGVCRGESEALLRKYSPYAAELALNGTHPHHRKGGA

SEQ ID NO: 171 - protein, 165 aa, synthetic construct
  REGION 1..165: note = pYY-BEM4.62; tr|A0A261BDB7|A0A261BDB7_CAERE polypeptide sequence
LYKLYIFRMTTTKANLTQFEQELVDKAVGAMEKAYCKYSGFKVGAALVCEDGEIIIGANHENASYGATICAERSAMVTALTKGHRKFKLLAVATELEAPCSPCGICRQYLIEFGDYKVILGSSTSDQIIETTTYGLLPYAFTPKSLDDHEKEAEERNHQEGEKKH

SEQ ID NO: 172 - protein, 162 aa, synthetic construct
  REGION 1..162: note = pYY-BEM4.63; tr|A0A2E1PHI6|A0A2E1PHI6_9GAMM polypeptide sequence
MKELLIHSWLMLNSNSKLIMERVIELSEINLKNGKIPIAAVIVDKKNYEIISESQNEDSPIGHAELLAITKALKKLNTNRLDSTNLFVTIEPCPMCAYAISKCHINRLYFGSEDEKGGGVINGPRIFESHNLKKIDYVSHCYHEKTTQLMQSFFQLKRNQQL

SEQ ID NO: 173 - protein, 133 aa, synthetic construct
  REGION 1..133: note = pYY-BEM4.64; tr|A0A378LUA7|A0A378LUA7_9GAMM polypeptide sequence
MDTIIKKMISNAHNTLAHSYSPYSKFSVASCICTDKDNFYTGVNVENSAYGLAICAETSAISAMVTAGEKRIKSMVVMAGTNILCSPCGACRQRIYEFSTPDTLIHLCDKNSILRTFKINELLPEAFKFDFNP

SEQ ID NO: 174 - protein, 370 aa, synthetic construct
  REGION 1..370: note = pYY-BEM4.65; tr|A0A139HQ78|A0A139HQ78_9PEZI polypeptide sequence
MADSLKSKPGHARHDTALIHGLSQSDVQKLSESCVDAKSKAYCPYSHFRVGCAVLLANGDVVQGANVENAAYPVGTCAERVALGTAVGAKKGDFRALAVSTDISPPASPCGMCRQFIREFCELNTPILMYDKDGKSVVMTLEQLLPMSFGPDKLLPPGQLENGLMQTQTQSSFVTRAFSTTSSRRQDDTPQVPQSHYDFFPQTFPQGPPPKTSFSPDLKQLRKEFLQLQAKAHPDLAPQDQKRRAEALSMRINEAYKTLQSPLRRAQYLLSQQGIDVEDETAKLDDSSLLMEVMEAREAVEEVEDEEQLNEIRAENNGRIEESVRVLEDAFRDNEFEKAAQEAIRLRYWVNIEESIQGWEKGNGGGILHH

SEQ ID NO: 175 - protein, 165 aa, synthetic construct
  REGION 1..165: note = pYY-BEM4.66; tr|A0A2A9FXV0|A0A2A9FXV0_9VIBR polypeptide sequence
MCNLKENKDMDKYFHFACDATIEGMREGTGGPFGATLTRNGEVVCSVANTVLKDMDISGHAEMVAVREACKKLDTLDLSDCVMYATCEPCPMCVSVMLWAGIKTCYYASTHLDAAKHGFSDQQLRDYLDGSDTSTLNMVHIEDNRDDCAKIWTEFRHLNETKNDG

SEQ ID NO: 176 - protein, 509 aa, synthetic construct
  REGION 1..509: note = pYY-BEM4.67; tr|A0A1A8AG96|A0A1A8AG96_NOTFU polypeptide sequence
MEHSDRWSRAEPGLSTSSRETRDGSTQTDCKLQGHGPRLSKVNLFTLLSLWMELFPQEQDEENGQSQIRRSGLVVVREGKVVGLHCSGADLHAGQAAILQHGASLANCQLFFSRRPCATCLKMIINAGVRQITFWPGDPEISMLTSNQTHSQRTSQSITEASLDATAVEKLKSNSRPQICVLMQPLAPGVLQFVDETSRRSDFMERMMDDDPELDSEKLFNSDRLRHLKDFCRHFLIQTDQRHKDILSQMGLKNFCVEPYFSNLRSNMTELVEVLAAVAAGMPQQHYGFYREESLSLDPHPVDVSQAVARHCIVQARLLSYRTEDPKVGVGAVIWAKGQSACCCGTGRLYLIGCGYNAYPAGSKYAEYPQMDNKQEDRERRKYRYIVHAEQNALTFRTRDIKPDECSMLFVTKCPCDECIPLIRGAGVKHIYTSDQDRDKDKGDISYLRFGSLKGVCKFIWQRSPPVSSASSLHLTNGCVGKHVRQAEQQIYKNKKLCTKGSSGSSDIC

SEQ ID NO: 177 - protein, 148 aa, synthetic construct
  REGION 1..148: note = pYY-BEM4.68; tr|A0A3E2VN88|A0A3E2VN88_9FIRM polypeptide sequence
MEKEITNMDKQKLIQMAVDGLGRSYAPYSHFHVSAALLCADGTVYTGNNIENAAYTPSVCAERCAIFKAVGDGRREFEAIAVCGGPDGVIEDYCPPCGVCRQVMREFCDPSSFRVLVAKTAEDYREYTLEQLLPDGFGPDHLTGSGER

SEQ ID NO: 178 - protein, 221 aa, synthetic construct
  REGION 1..221: note = pYY-BEM4.69; tr|A0A2D5ZRJ2|A0A2D5ZRJ2_9BACT polypeptide sequence
MARPVHLHTGERRTEEGATESRAVAAVATAITRAPRAPPRPATGRERDGPPPRRVFGGGLRVGDPSGYDRGESKPIGGPLTEKRSDWHSYFMRIAGEVATRATCDRKHVGAVIVRNRTILSTGYNGSIRGMPHCDDVGHDMVDGHCIATIHAEANAILQAARNGVMIQDGSIYITASPCWNCFKLVANAGLKRVYYGEFYRDKRSFEVARRLGIDLMHIEV

SEQ ID NO: 179 - protein, 155 aa, synthetic construct
  REGION 1..155: note = pYY-BEM4.70; tr|A0A1B8WPS3|A0A1B8WPS3_9BACI polypeptide sequence
MEGVQLIYQFQWGNLIMTVNKEDLYLIDVARNTIKTLYVDGKHHVGAAVRTKTGKIYSAVHLEANIGRVSVCAEAIALGKAISEGESEFDTIVAVRHPDPTQENQKIEVVSPCGICRELISDYGKGTNVILKNKEGYIKTVISDLLPNKYIREDN

SEQ ID NO: 180 - protein, 156 aa, synthetic construct
  REGION 1..156: note = pYY-BEM4.71; tr|A0A1W5ZQK9|A0A1W5ZQK9_9BACI polypeptide sequence
MNRFMERAVSLAAENVRVGGQPFGAVLVKDDELVAEGVNEMHLNYDVSGHAELLAIRRAQGELQTHDLSGYTMYASGEPCPMCLSAMYFAGIKDVFYCATVEEAAQVGLEKSKNVYDDLQKSKGERSLVMKQMPLEDDQEDPMKLWDERTNHNGTS

SEQ ID NO: 181 - protein, 340 aa, synthetic construct
  REGION 1..340: note = pYY-BEM4.72; tr|A0A378V0W4|A0A378V0W4_MYCFO polypeptide sequence
MVHAQFDPTARQALAATAVEAKTRKDLTWQQIADAAELSPAFVTAAVLGQHALPARSAEAVAALLGLDDDAALLLQTIPIRGSIPGGIPTDPTIYRFYEMLQVYGTTLKALVHEQFGDGIISAINFKLDVRKVADPEGGERAVITLDGKYLPPNPFDRVRYRGGLMDFAQRTIDIARQNVAEGGRPFATVIVKNGEILAESPNLVAQTHDPTAHAEILAIRKACTRIGTEHLIGATIYVLAQPCPMCLGSLYYCSPDEVVFLTTRDAYEPHYVDDRKYFELNMFYDEFAKPWDQRRLPMRYEPRDAAVDVYKLWQERNGGERRVPGAPTSTRPGKNPRGE

SEQ ID NO: 182 - protein, 157 aa, synthetic construct
  REGION 1..157: note = pYY-BEM4.73; tr|I3XF03|I3XF03_RHIFR polypeptide sequence
MKQRCMSPKSAQRFWDNDMHNNKDRPMSENELFVAAREAMAKAHAPYSKFPVGAAIRAEDGQIYTGANIENLSFPEGWCAETTAISHMVMAGQRKIMEVAVIAEKLALCPPCGGCRQRLAEFSGASTRIYLCDETGIKKSLALSDLLPHSFETEILG

SEQ ID NO: 183 - protein, 595 aa, synthetic construct
  REGION 1..595: note = pYY-BEM4.74; tr|F8IEF3|F8IEF3_ALIAT polypeptide sequence
MDAKELETRGWLCMRAVDVIDKKRRGEALAEEELRFLIEGYVAGRIPDYQMSAFLMAVVWRGMTREETLVLTRLLADSGERLDLSGIPGVKVDKHSTGGVGDKATLVVLPLVASIGVPVIKMSGRGLGHTGGTIDKLESIPGFRTDLSVAELVAQVRQVGIALGGQTADLAPADKKLYALRDVTGTVESLPLIASSVMSKKLAGGADAIVLDVKVGDGAFMKSRSDARRLARLMVEIGEAAGRRTVAVLSNMDQPLGCAIGNALEVAEAIRVLSGEGPFDLAEIALALAEEMTVLAGVAATREEARRMLRQSVAEGRALETLRRWIAAQGGDPAVVDDPSRLPQAPVQMPYLPKKAGFVAKLSALAFGLAAMRLGAGRETKEEAIDPSVGIVLHAKVGDRVQTHRPMFTVHARTGEDALRCIQELEAAIQISDDPVEAPPLILARIDRSEALPYADLMDAAREARDRAYVPYSGFAVGAALELADGRMVTGANVENASYGLTNCAERSAVFRAVAEGGPGTKPEIRAVAVIADSPEPVSPCGACRQVLAEFCSPDTPVYLGNLQGDVRETTVGALLPGAFTDAQMANVRRQDKEA

SEQ ID NO: 184 - protein, 153 aa, synthetic construct
  REGION 1..153: note = pYY-BEM4.75; tr|A0A1G3M638|A0A1G3M638_9SPIR polypeptide sequence
MKTTNINALDKWDLRFLQMAEHVAEWSKDPSTKVGAVIVRPDRTIASVGFNGFARGVRDTVERLWNRELKYPLTVHAELNAILSAHEPVRGHSLYVSPLSPCSNCAGVIIQSGIARVVAKCGQVNNPAQWSESFNLALTAFAEAGVSVILVEH

SEQ ID NO: 185 - protein, 177 aa, synthetic construct
  REGION 1..177: note = pYY-BEM4.76; tr|A0A3D9LFR2|A0A3D9LFR2_9MICC polypeptide sequence
MEQNDHGSSGAFSDPFEDDIPLTASLPRITGTGSGIDWQRLESTARAAMTRAYVPYSRFPVGAAALVEDGRVVAGCNIENASLGLTLCAECSLVSNLQMSGGGRIVAFYCVDGNGEVLMPCGRCRQLLYEFHAPGMRLMGPDGELTMDEVLPLAFGPADMTHLSDSAASTDDPGRTR

SEQ ID NO: 186 - protein, 172 aa, synthetic construct
  REGION 1..172: note = pYY-BEM4.77; tr|A0A3B9YGB5|A0A3B9YGB5_9BACT polypeptide sequence
MAKPISKKYRKLIETAKAARKKAYSPYSRYQVGAAVLTESGRIYSGANMENASYGLCMCAERVAIANAVTRGEKVLQAVCVVGKKARPCGACRQVMLEFSTKETELLMVDIDPNARRDTVIRTRVYSMLPNPFDPFESGMLPQHPQNLLRRRKSPQPRRKRRSRPVHREVSR

SEQ ID NO: 187 - protein, 391 aa, synthetic construct
  REGION 1..391: note = pYY-BEM4.78; tr|A0A182F569|A0A182F569_ANOAL polypeptide sequence
MPRPSQFRVSSSQSLSNSQIQASQSSDSVVDITSYVNAVVKALLNLSCTKTIIKRADLVNIALKGNGRLIGRVLQDANIELKEIYGYELIEVEKSKTMILCSTLAAGSMDELNDANRRRYTFLYLILGYIFMKNGSVPETIVWEFLETLGIEEQQEHNYFGDVRKLYDSLFKQAYLTRTKQALEGLNDDVMLISWGVRSKHEVSKKDILAGFCKVMNRDPVDFKAQYIEANEKDDKMNNNINGTVDGRNTVEYSSLDASVKELIEAAIKVRNNAYCPYSNFAVGAALRTVGGDIVTGCNVENGTFGPSVCAERTAVCKAVSEGHREFTAVAVVAFQETEFTAPCGTCRQTLSEFSRKDIPIYLVKPSPVRVMVTSLFQLLPHAFSPSFLNK

SEQ ID NO: 188 - protein, 151 aa, synthetic construct
  REGION 1..151: note = pYY-BEM4.79; tr|A0A264Z0D4|A0A264Z0D4_9BACI polypeptide sequence
MEPKKLIEEAIVASKQAYVQYSNFHVGAALLTKDGKLYHGCNIENASYGLTNCAERTAIFKAVSEGEKEFQAIAVVGDTEGPISPCGACRQVLAEFFSPDTVVILANLKGDHVVTNINELLPGFFSSKDLQKKVKNCFEKNALGSSCLRPI

SEQ ID NO: 189 - protein, 229 aa, synthetic construct
  REGION 1..229: note = pYY-BEM4.80; tr|A0A1L9Q1R3|A0A1L9Q1R3_ASPVE polypeptide sequence
MPLSAEEAALVETATATINSIPLSEDYSVASAAKASDGRVFTGVNVYHFTGGPCAELVVLGVAAAAGAAQLTHIVAVANEQRGILSPCGRCRQVLLDLQPNIQVIVGKEGSEQSVPVAQLLPFSYRQPDQHTPVIFKALTSSGPVVVDFFATWCGPCKAVAPVVGKLSETYTDVRFIQVDVDKARSISQEHDIRAMPTFVLYKDGKLLDKRVVGGNMKELEEQIKAIIA

SEQ ID NO: 190 - protein, 18 aa, synthetic construct
  REGION 1..18: note = synthetic peptide
KRTADGSEFESPKKKRKV

SEQ ID NO: 191 - protein, 16 aa, synthetic construct
  REGION 1..16: note = synthetic peptide
KRPAATKKAGQAKKKK

SEQ ID NO: 192 - protein, 17 aa, synthetic construct
  REGION 1..17: note = synthetic peptide
KKTELQTTNAENKTKKL

SEQ ID NO: 193 - protein, 19 aa, synthetic construct
  REGION 1..19: note = synthetic peptide
KRGINDRNFWRGENGRKTR

SEQ ID NO: 194 - protein, 16 aa, synthetic construct
  REGION 1..16: note = synthetic peptide
RKSGKIAAIVVKRPRK

SEQ ID NO: 195 - protein, 7 aa, synthetic construct
  REGION 1..7: note = synthetic peptide
PKKKRKV

SEQ ID NO: 196 - protein, 30 aa, synthetic construct
  REGION 1..30: note = synthetic polypeptide
MDSLLMNRRKFLYQFKNVRWAKGRRETYLC

SEQ ID NO: 197 - protein, 1368 aa, Streptococcus pyogenes [sequence omitted]

SEQ ID NO: 198 - DNA, 4104 bp, Streptococcus pyogenes
  misc_feature 1..4104: note = wild type spCas9 polynucleotide sequence
  source 1..4104: mol_type = genomic DNA
atggataagaaatactcaataggcttagatatcggcacaaatagcgtcggatgggcggtgatcactgatgattataaggttccgtctaaaaagttcaaggttctgggaaatacagaccgccacagtatcaaaaaaaatcttataggggctcttttatttggcagtggagagacagcggaagcgactcgtctcaaacggacagctcgtagaaggtatacacgtcggaagaatcgtatttgttatctacaggagattttttcaaatgagatggcgaaagtagatgatagtttctttcatcgacttgaagagtcttttttggtggaagaagacaagaagcatgaacgtcatcctatttttggaaatatagtagatgaagttgcttatcatgagaaatatccaactatctatcatctgcgaaaaaaattggcagattctactgataaagcggatttgcgcttaatctatttggccttagcgcatatgattaagtttcgtggtcattttttgattgagggagatttaaatcctgataatagtgatgtggacaaactatttatccagttggtacaaatctacaatcaattatttgaagaaaaccctattaacgcaagtagagtagatgctaaagcgattctttctgcacgattgagtaaatcaagacgattagaaaatctcattgctcagctccccggtgagaagagaaatggcttgtttgggaatctcattgctttgtcattgggattgacccctaattttaaatcaaattttgatttggcagaagatgctaaattacagctttcaaaagatacttacgatgatgatttagataatttattggcgcaaattggagatcaatatgctgatttgtttttggcagctaagaatttatcagatgctattttactttcagatatcctaagagtaaatagtgaaataactaaggctcccctatcagcttcaatgattaagcgctacgatgaacatcatcaagacttgactcttttaaaagctttagttcgacaacaacttccagaaaagtataaagaaatcttttttgatcaatcaaaaaacggatatgcaggttatattgatgggggagctagccaagaagaattttataaatttatcaaaccaattttagaaaaaatggatggtactgaggaattattggtgaaactaaatcgtgaagatttgctgcgcaagcaacggacctttgacaacggctctattccccatcaaattcacttgggtgagctgcatgctattttgagaagacaagaagacttttatccatttttaaaagacaatcgtgagaagattgaaaaaatcttgacttttcgaattccttattatgttggtccattggcgcgtggcaatagtcgttttgcatggatgactcggaagtctgaagaaacaattaccccatggaattttgaagaagttgtcgataaaggtgcttcagctcaatcatttattgaacgcatgacaaactttgataaaaatcttccaaatgaaaaagtactaccaaaacatagtttgctttatgagtattttacggtttataacgaattgacaaaggtcaaatatgttactgagggaatgcgaaaaccagcatttctttcaggtgaacagaagaaagccattgttgatttactcttcaaaacaaatcgaaaagtaaccgttaagcaattaaaagaagattatttcaaaaaaatagaatgttttgatagtgttgaaatttcaggagttgaagatagatttaatgcttcattaggcgcctaccatgatttgctaaaaattattaaagataaagattttttggataatgaagaaaatgaagatatcttagaggatattgttttaacattgaccttatttgaagatagggggatgattgaggaaagacttaaaacatatgctcacctctttgatgataaggtgatgaaacagcttaaacgtcgccgttatactggttggggacgtttgtctcgaaaattgattaatggtattagggataagcaatctggcaaaacaatattagattttttgaaatcagatggttttgccaatcgcaattttatgcagctgatccatgatgatagtttgacatttaaagaagatattcaaaaagcacaggtgtctggacaaggccatagtttacatgaacagattgctaacttagctggcagtcctgctattaaaaaaggtattttacagactgtaaaaattgttgatgaactggtcaaagtaatggggcataagccagaaaatatcgttattgaaatggcacgtgaaaatcagacaactcaaaagggccagaaaaattcgcgagagcgtatgaaacgaatcgaagaaggtatcaaagaattaggaagtcagattcttaaagagcatcctgttgaaaatactcaattgcaaaatgaaaagctctatctctattatctacaaaatggaagagacatgtatgtggaccaagaattagatattaatcgtttaagtgattatgatgtcgatcacattgttccacaaagtttcattaaagacgattcaatagacaataaggtactaacgcgttctgataaaaatcgtggtaaatcggataacgttccaagtgaagaagtagtcaaaaagatgaaaaactattggagacaacttctaaacgccaagttaatcactcaacgtaagtttgataatttaacgaaagctgaacgtggaggtttgagtgaacttgataaagctggttttatcaaacgccaattggttgaaactcgccaaatcactaagcatgtggcacaaattttggatagtcgcatgaatactaaatacgatgaaaatgataaacttattcgagaggttaaagtgattaccttaaaatctaaattagtttctgacttccgaaaagatttccaattctataaagtacgtgagattaacaattaccatcatgcccatgatgcgtatctaaatgccgtcgttggaactgctttgattaagaaatatccaaaacttgaatcggagtttgtctatggtgattataaagtttatgatgttcgtaaaatgattgctaagtctgagcaagaaataggcaaagcaaccgcaaaatatttcttttactctaatatcatgaacttcttcaaaacagaaattacacttgcaaatggagagattcgcaaacgccctctaatcgaaactaatggggaaactggagaaattgtctgggataaagggcgagattttgccacagtgcgcaaagtattgtccatgccccaagtcaatattgtcaagaaaacagaagtacagacaggcggattctccaaggagtcaattttaccaaaaagaaattcggacaagcttattgctcgtaaaaaagactgggatccaaaaaaatatggtggttttgatagtccaacggtagcttattcagtcctagtggttgctaaggtggaaaaagggaaatcgaagaagttaaaatccgttaaagagttactagggatcacaattatggaaagaagttcctttgaaaaaaatccgattgactttttagaagctaaaggatataaggaagttaaaaaagacttaatcattaaactacctaaatatagtctttttgagttagaaaacggtcgtaaacggatgctggctagtgccggagaattacaaaaaggaaatgagctggctctgccaagcaaatatgtgaattttttatatttagctagtcattatgaaaagttgaagggtagtccagaagataacgaacaaaaacaattgtttgtggagcagcataagcattatttagatgagattattgagcaaatcagtgaattttctaagcgtgttattttagcagatgccaatttagataaagttcttagtgcatataacaaacatagagacaaaccaatacgtgaacaagcagaaaatattattcatttatttacgttgacgaatcttggagctcccgctgcttttaaatattttgatacaacaattgatcgtaaacgatatacgtctacaaaagaagttttagatgccactcttatccatcaatccatcactggtctttatgaaacacgcattgatttgagtcagctaggaggtgactga

SEQ ID NO: 199 - protein, 1367 aa, Streptococcus pyogenes
  REGION 1..1367: note = MISC_FEATURE - spCas9 polypeptide sequence
MDKKYSIGLDIGTNSVGWAVITDDYKVPSKKFKVLGNTDRHSIKKNLIGALLFGSGETAEATRLKRTARRRYTRRKNRICYLQEIFSNEMAKVDDSFFHRLEESFLVEEDKKHERHPIFGNIVDEVAYHEKYPTIYHLRKKLADSTDKADLRLIYLALAHMIKFRGHFLIEGDLNPDNSDVDKLFIQLVQIYNQLFEENPINASRVDAKAILSARLSKSRRLENLIAQLPGEKRNGLFGNLIALSLGLTPNFKSNFDLAEDAKLQLSKDTYDDDLDNLLAQIGDQYADLFLAAKNLSDAILLSDILRVNSEITKAPLSASMIKRYDEHHQDLTLLKALVRQQLPEKYKEIFFDQSKNGYAGYIDGGASQEEFYKFIKPILEKMDGTEELLVKLNREDLLRKQRTFDNGSIPHQIHLGELHAILRRQEDFYPFLKDNREKIEKILTFRIPYYVGPLARGNSRFAWMTRKSEETITPWNFEEVVDKGASAQSFIERMTNFDKNLPNEKVLPKHSLLYEYFTVYNELTKVKYVTEGMRKPAFLSGEQKKAIVDLLFKTNRKVTVKQLKEDYFKKIECFDSVEISGVEDRFNASLGAYHDLLKIIKDKDFLDNEENEDILEDIVLTLTLFEDRGMIEERLKTYAHLFDDKVMKQLKRRRYTGWGRLSRKLINGIRDKQSGKTILDFLKSDGFANRNFMQLIHDDSLTFKEDIQKAQVSGQGHSLHEQIANLAGSPAIKKGILQTVKIVDELVKVMGHKPENIVIEMARENQTTQKGQKNSRERMKRIEEGIKELGSQILKEHPVENTQLQNEKLYLYYLQNGRDMYVDQELDINRLSDYDVDHIVPQSFIKDDSIDNKVLTRSDKNRGKSDNVPSEEVVKKMKNYWRQLLNAKLITQRKFDNLTKAERGGLSELDKAGFIKRQLVETRQITKHVAQILDSRMNTKYDENDKLIREVKVITLKSKLVSDFRKDFQFYKVREINNYHHAHDAYLNAVVGTALIKKYPKLESEFVYGDYKVYDVRKMIAKSEQEIGKATAKYFFYSNIMNFFKTEITLANGEIRKRPLIETNGETGEIVWDKGRDFATVRKVLSMPQVNIVKKTEVQTGGFSKESILPKRNSDKLIARKKDWDPKKYGGFDSPTVAYSVLVVAKVEKGKSKKLKSVKELLGITIMERSSFEKNPIDFLEAKGYKEVKKDLIIKLPKYSLFELENGRKRMLASAGELQKGNELALPSKYVNFLYLASHYEKLKGSPEDNEQKQLFVEQHKHYLDEIIEQISEFSKRVILADANLDKVLSAYNKHRDKPIREQAENIIHLFTLTNLGAPAAFKYFDTTIDRKRYTSTKEVLDATLIHQSITGLYETRIDLSQLGGD

SEQ ID NO: 200 - DNA, 4212 bp, synthetic construct
  misc_feature 1..4212: note = wild-type Cas9 polynucleotide sequence
  misc_feature 5..58: note = RuvC domain
  misc_feature 718..764: note = RuvC domain
  misc_feature 772..901: note = HNH domain
  misc_feature 906..1101: note = RuvC domain
  source 1..4212: mol_type = other DNA
atggataaaaagtattctattggtttagacatcggcactaattccgttggatgggctgtcataaccgatgaatacaaagtaccttcaaagaaatttaaggtgttggggaacacagaccgtcattcgattaaaaagaatcttatcggtgccctcctattcgatagtggcgaaacggcagaggcgactcgcctgaaacgaaccgctcggagaaggtatacacgtcgcaagaaccgaatatgttacttacaagaaatttttagcaatgagatggccaaagttgacgattctttctttcaccgtttggaagagtccttccttgtcgaagaggacaagaaacatgaacggcaccccatctttggaaacatagtagatgaggtggcatatcatgaaaagtacccaacgatttatcacctcagaaaaaagctagttgactcaactgataaagcggacctgaggttaatctacttggctcttgcccatatgataaagttccgtgggcactttctcattgagggtgatctaaatccggacaactcggatgtcgacaaactgttcatccagttagtacaaacctataatcagttgtttgaagagaaccctataaatgcaagtggcgtggatgcgaaggctattcttagcgcccgcctctctaaatcccgacggctagaaaacctgatcgcacaattacccggagagaagaaaaatgggttgttcggtaaccttatagcgctctcactaggcctgacaccaaattttaagtcgaacttcgacttagctgaagatgccaaattgcagcttagtaaggacacgtacgatgacgatctcgacaatctactggcacaaattggagatcagtatgcggacttatttttggctgccaaaaaccttagcgatgcaatcctcctatctgacatactgagagttaatactgagattaccaaggcgccgttatccgcttcaatgatcaaaaggtacgatgaacatcaccaagacttgacacttctcaaggccctagtccgtcagcaactgcctgagaaatataaggaaatattctttgatcagtcgaaaaacgggtacgcaggttatattgacggcggagcgagtcaagaggaattctacaagtttatcaaacccatattagagaagatggatgggacggaagagttgcttgtaaaactcaatcgcgaagatctactgcgaaagcagcggactttcgacaacggtagcattccacatcaaatccacttaggcgaattgcatgctatacttagaaggcaggaggatttttatccgttcctcaaagacaatcgtgaaaagattgagaaaatcctaacctttcgcataccttactatgtgggacccctggcccgagggaactctcggttcgcatggatgacaagaaagtccgaagaaacgattactccatggaattttgaggaagttgtcgataaaggtgcgtcagctcaatcgttcatcgagaggatgaccaactttgacaagaatttaccgaacgaaaaagtattgcctaagcacagtttactttacgagtatttcacagtgtacaatgaactcacgaaagttaagtatgtcactgagggcatgcgtaaacccgcctttctaagcggagaacagaagaaagcaatagtagatctgttattcaagaccaaccgcaaagtgacagttaagcaattgaaagaggactactttaagaaaattgaatgcttcgattctgtcgagatctccggggtagaagatcgatttaatgcgtcacttggtacgtatcatgacctcctaaagataattaaagataaggacttcctggataacgaagagaatgaagatatcttagaagatatagtgttgactcttaccctctttgaagatcgggaaatgattgaggaaagactaaaaacatacgctcacctgttcgacgataaggttatgaaacagttaaagaggcgtcgctatacgggctggggacgattgtcgcggaaacttatcaacgggataagagacaagcaaagtggtaaaactattctcgattttctaaagagcgacggcttcgccaataggaactttatgcagctgatccatgatgactctttaaccttcaaagaggatatacaaaaggcacaggtttccggacaaggggactcattgcacgaacatattgcgaatcttgctggttcgccagccatcaaaaagggcatactccagacagtcaaagtagtggatgagctagttaaggtcatgggacgtcacaaaccggaaaacattgtaatcgagatggcacgcgaaaatcaaacgactcagaaggggcaaaaaaacagtcgagagcggatgaagagaatagaagagggtattaaagaactgggcagccagatcttaaaggagcatcctgtggaaaatacccaattgcagaacgagaaactttacctctattacctacaaaatggaagggacatgtatgttgatcaggaactggacataaaccgtttatctgattacgacgtcgatcacattgtaccccaatcctttttgaaggacgattcaatcgacaataaagtgcttacacgctcggataagaaccgagggaaaagtgacaatgttccaagcgaggaagtcgtaaagaaaatgaagaactattggcggcagctcctaaatgcgaaactgataacgcaaagaaagttcgataacttaactaaagctgagaggggtggcttgtctgaacttgacaaggccggatttattaaacgtcagctcgtggaaacccgccaaatcacaaagcatgttgcacagatactagattcccgaatgaatacgaaatacgacgagaacgataagctgattcgggaagtcaaagtaatcactttaaagtcaaaattggtgtcggacttcagaaaggattttcaattctataaagttagggagataaataactaccaccatgcgcacgacgcttatcttaatgccgtcgtagggaccgcactcattaagaaatacccgaagctagaaagtgagtttgtgtatggtgattacaaagtttatgacgtccgtaagatgatcgcgaaaagcgaacaggagataggcaaggctacagccaaatacttcttttattctaacattatgaatttctttaagacggaaatcactctggcaaacggagagatacgcaaacgacctttaattgaaaccaatggggagacaggtgaaatcgtatgggataagggccgggacttcgcgacggtgagaaaagttttgtccatgccccaagtcaacatagtaaagaaaactgaggtgcagaccggagggttttcaaaggaatcgattcttccaaaaaggaatagtgataagctcatcgctcgtaaaaaggactgggacccgaaaaagtacggtggcttcgatagccctacagttgcctattctgtcctagtagtggcaaaagttgagaagggaaaatccaagaaactgaagtcagtcaaagaattattggggataacgattatggagcgctcgtcttttgaaaagaaccccatcgacttccttgaggcgaaaggttacaaggaagtaaaaaaggatctcataattaaactaccaaagtatagtctgtttgagttagaaaatggccgaaaacggatgttggctagcgccggagagcttcaaaaggggaacgaactcgcactaccgtctaaatacgtgaatttcctgtatttagcgtcccattacgagaagttgaaaggttcacctgaagataacgaacagaagcaactttttgttgagcagcacaaacattatctcgacgaaatcatagagcaaatttcggaattcagtaagagagtcatcctagctgatgccaatctggacaaagtattaagcgcatacaacaagcacagggataaacccatacgtgagcaggcggaaaatattatccatttgtttactcttaccaacctcggcgctccagccgcattcaagtattttgacacaacgatagatcgcaaacgatacacttctaccaaggaggtgctagacgcgacactgattcaccaatccatcacgggattatatgaaactcggatagatttgtcacagcttgggggtgacggatcccccaagaagaagaggaaagtctcgagcgactacaaagaccatgacggtgattataaagatcatgacatcgattacaaggatgacgatgacaaggctgcagga

SEQ ID NO: 201 - protein, 1368 aa, synthetic construct
  REGION 1..1368: note = exemplary catalytically active Cas9 nickase (nCas9) polypeptide sequence
MDKKYSIGLAIGTNSVGWAVITDEYKVPSKKFKVLGNTDRHSIKKNLIGALLFDSGETAEATRLKRTARRRYTRRKNRICYLQEIFSNEMAKVDDSFFHRLEESFLVEEDKKHERHPIFGNIVDEVAYHEKYPTIYHLRKKLVDSTDKADLRLIYLALAHMIKFRGHFLIEGDLNPDNSDVDKLFIQLVQTYNQLFEENPINASGVDAKAILSARLSKSRRLENLIAQLPGEKKNGLFGNLIALSLGLTPNFKSNFDLAEDAKLQLSKDTYDDDLDNLLAQIGDQYADLFLAAKNLSDAILLSDILRVNTEITKAPLSASMIKRYDEHHQDLTLLKALVRQQLPEKYKEIFFDQSKNGYAGYIDGGASQEEFYKFIKPILEKMDGTEELLVKLNREDLLRKQRTFDNGSIPHQIHLGELHAILRRQEDFYPFLKDNREKIEKILTFRIPYYVGPLARGNSRFAWMTRKSEETITPWNFEEVVDKGASAQSFIERMTNFDKNLPNEKVLPKHSLLYEYFTVYNELTKVKYVTEGMRKPAFLSGEQKKAIVDLLFKTNRKVTVKQLKEDYFKKIECFDSVEISGVEDRFNASLGTYHDLLKIIKDKDFLDNEENEDILEDIVLTLTLFEDREMIEERLKTYAHLFDDKVMKQLKRRRYTGWGRLSRKLINGIRDKQSGKTILDFLKSDGFANRNFMQLIHDDSLTFKEDIQKAQVSGQGDSLHEHIANLAGSPAIKKGILQTVKVVDELVKVMGRHKPENIVIEMARENQTTQKGQKNSRERMKRIEEGIKELGSQILKEHPVENTQLQNEKLYLYYLQNGRDMYVDQELDINRLSDYDVDHIVPQSFLKDDSIDNKVLTRSDKNRGKSDNVPSEEVVKKMKNYWRQLLNAKLITQRKFDNLTKAERGGLSELDKAGFIKRQLVETRQITKHVAQILDSRMNTKYDENDKLIREVKVITLKSKLVSDFRKDFQFYKVREINNYHHAHDAYLNAVVGTALIKKYPKLESEFVYGDYKVYDVRKMIAKSEQEIGKATAKYFFYSNIMNFFKTEITLANGEIRKRPLIETNGETGEIVWDKGRDFATVRKVLSMPQVNIVKKTEVQTGGFSKESILPKRNSDKLIARKKDWDPKKYGGFDSPTVAYSVLVVAKVEKGKSKKLKSVKELLGITIMERSSFEKNPIDFLEAKGYKEVKKDLIIKLPKYSLFELENGRKRMLASAGELQKGNELALPSKYVNFLYLASHYEKLKGSPEDNEQKQLFVEQHKHYLDEIIEQISEFSKRVILADANLDKVLSAYNKHRDKPIREQAENIIHLFTLTNLGAPAAFKYFDTTIDRKRYTSTKEVLDATLIHQSITGLYETRIDLSQLGGD

SEQ ID NO: 202 - DNA, 4107 bp, Streptococcus pyogenes
  misc_feature 1..4107: note = Cas9 from Streptococcus pyogenes (NCBI Ref. Seq.: NC_002737.2)polynucleotide sequence
  source 1..4107: mol_type = genomic DNA
atggataagaaatactcaataggcttagatatcggcacaaatagcgtcggatgggcggtgatcactgatgaatataaggttccgtctaaaaagttcaaggttctgggaaatacagaccgccacagtatcaaaaaaaatcttataggggctcttttatttgacagtggagagacagcggaagcgactcgtctcaaacggacagctcgtagaaggtatacacgtcggaagaatcgtatttgttatctacaggagattttttcaaatgagatggcgaaagtagatgatagtttctttcatcgacttgaagagtcttttttggtggaagaagacaagaagcatgaacgtcatcctatttttggaaatatagtagatgaagttgcttatcatgagaaatatccaactatctatcatctgcgaaaaaaattggtagattctactgataaagcggatttgcgcttaatctatttggccttagcgcatatgattaagtttcgtggtcattttttgattgagggagatttaaatcctgataatagtgatgtggacaaactatttatccagttggtacaaacctacaatcaattatttgaagaaaaccctattaacgcaagtggagtagatgctaaagcgattctttctgcacgattgagtaaatcaagacgattagaaaatctcattgctcagctccccggtgagaagaaaaatggcttatttgggaatctcattgctttgtcattgggtttgacccctaattttaaatcaaattttgatttggcagaagatgctaaattacagctttcaaaagatacttacgatgatgatttagataatttattggcgcaaattggagatcaatatgctgatttgtttttggcagctaagaatttatcagatgctattttactttcagatatcctaagagtaaatactgaaataactaaggctcccctatcagcttcaatgattaaacgctacgatgaacatcatcaagacttgactcttttaaaagctttagttcgacaacaacttccagaaaagtataaagaaatcttttttgatcaatcaaaaaacggatatgcaggttatattgatgggggagctagccaagaagaattttataaatttatcaaaccaattttagaaaaaatggatggtactgaggaattattggtgaaactaaatcgtgaagatttgctgcgcaagcaacggacctttgacaacggctctattccccatcaaattcacttgggtgagctgcatgctattttgagaagacaagaagacttttatccatttttaaaagacaatcgtgagaagattgaaaaaatcttgacttttcgaattccttattatgttggtccattggcgcgtggcaatagtcgttttgcatggatgactcggaagtctgaagaaacaattaccccatggaattttgaagaagttgtcgataaaggtgcttcagctcaatcatttattgaacgcatgacaaactttgataaaaatcttccaaatgaaaaagtactaccaaaacatagtttgctttatgagtattttacggtttataacgaattgacaaaggtcaaatatgttactgaaggaatgcgaaaaccagcatttctttcaggtgaacagaagaaagccattgttgatttactcttcaaaacaaatcgaaaagtaaccgttaagcaattaaaagaagattatttcaaaaaaatagaatgttttgatagtgttgaaatttcaggagttgaagatagatttaatgcttcattaggtacctaccatgatttgctaaaaattattaaagataaagattttttggataatgaagaaaatgaagatatcttagaggatattgttttaacattgaccttatttgaagatagggagatgattgaggaaagacttaaaacatatgctcacctctttgatgataaggtgatgaaacagcttaaacgtcgccgttatactggttggggacgtttgtctcgaaaattgattaatggtattagggataagcaatctggcaaaacaatattagattttttgaaatcagatggttttgccaatcgcaattttatgcagctgatccatgatgatagtttgacatttaaagaagacattcaaaaagcacaagtgtctggacaaggcgatagtttacatgaacatattgcaaatttagctggtagccctgctattaaaaaaggtattttacagactgtaaaagttgttgatgaattggtcaaagtaatggggcggcataagccagaaaatatcgttattgaaatggcacgtgaaaatcagacaactcaaaagggccagaaaaattcgcgagagcgtatgaaacgaatcgaagaaggtatcaaagaattaggaagtcagattcttaaagagcatcctgttgaaaatactcaattgcaaaatgaaaagctctatctctattatctccaaaatggaagagacatgtatgtggaccaagaattagatattaatcgtttaagtgattatgatgtcgatcacattgttccacaaagtttccttaaagacgattcaatagacaataaggtcttaacgcgttctgataaaaatcgtggtaaatcggataacgttccaagtgaagaagtagtcaaaaagatgaaaaactattggagacaacttctaaacgccaagttaatcactcaacgtaagtttgataatttaacgaaagctgaacgtggaggtttgagtgaacttgataaagctggttttatcaaacgccaattggttgaaactcgccaaatcactaagcatgtggcacaaattttggatagtcgcatgaatactaaatacgatgaaaatgataaacttattcgagaggttaaagtgattaccttaaaatctaaattagtttctgacttccgaaaagatttccaattctataaagtacgtgagattaacaattaccatcatgcccatgatgcgtatctaaatgccgtcgttggaactgctttgattaagaaatatccaaaacttgaatcggagtttgtctatggtgattataaagtttatgatgttcgtaaaatgattgctaagtctgagcaagaaataggcaaagcaaccgcaaaatatttcttttactctaatatcatgaacttcttcaaaacagaaattacacttgcaaatggagagattcgcaaacgccctctaatcgaaactaatggggaaactggagaaattgtctgggataaagggcgagattttgccacagtgcgcaaagtattgtccatgccccaagtcaatattgtcaagaaaacagaagtacagacaggcggattctccaaggagtcaattttaccaaaaagaaattcggacaagcttattgctcgtaaaaaagactgggatccaaaaaaatatggtggttttgatagtccaacggtagcttattcagtcctagtggttgctaaggtggaaaaagggaaatcgaagaagttaaaatccgttaaagagttactagggatcacaattatggaaagaagttcctttgaaaaaaatccgattgactttttagaagctaaaggatataaggaagttaaaaaagacttaatcattaaactacctaaatatagtctttttgagttagaaaacggtcgtaaacggatgctggctagtgccggagaattacaaaaaggaaatgagctggctctgccaagcaaatatgtgaattttttatatttagctagtcattatgaaaagttgaagggtagtccagaagataacgaacaaaaacaattgtttgtggagcagcataagcattatttagatgagattattgagcaaatcagtgaattttctaagcgtgttattttagcagatgccaatttagataaagttcttagtgcatataacaaacatagagacaaaccaatacgtgaacaagcagaaaatattattcatttatttacgttgacgaatcttggagctcccgctgcttttaaatattttgatacaacaattgatcgtaaacgatatacgtctacaaaagaagttttagatgccactcttatccatcaatccatcactggtctttatgaaacacgcattgatttgagtcagctaggaggtgactga

SEQ ID NO: 203 - protein, 1368 aa, synthetic construct
  REGION 1..1368: note = catalytically inactive Cas9 (dCas9)polypeptide sequence
  REGION 5..58: note = MISC_FEATURE - RuvC domain
  REGION 718..764: note = MISC_FEATURE - RuvC domain
  REGION 773..902: note = MISC_FEATURE - HNH domain
  REGION 907..1102: note = MISC_FEATURE - RuvC domain
MDKKYSIGLAIGTNSVGWAVITDEYKVPSKKFKVLGNTDRHSIKKNLIGALLFDSGETAEATRLKRTARRRYTRRKNRICYLQEIFSNEMAKVDDSFFHRLEESFLVEEDKKHERHPIFGNIVDEVAYHEKYPTIYHLRKKLVDSTDKADLRLIYLALAHMIKFRGHFLIEGDLNPDNSDVDKLFIQLVQTYNQLFEENPINASGVDAKAILSARLSKSRRLENLIAQLPGEKKNGLFGNLIALSLGLTPNFKSNFDLAEDAKLQLSKDTYDDDLDNLLAQIGDQYADLFLAAKNLSDAILLSDILRVNTEITKAPLSASMIKRYDEHHQDLTLLKALVRQQLPEKYKEIFFDQSKNGYAGYIDGGASQEEFYKFIKPILEKMDGTEELLVKLNREDLLRKQRTFDNGSIPHQIHLGELHAILRRQEDFYPFLKDNREKIEKILTFRIPYYVGPLARGNSRFAWMTRKSEETITPWNFEEVVDKGASAQSFIERMTNFDKNLPNEKVLPKHSLLYEYFTVYNELTKVKYVTEGMRKPAFLSGEQKKAIVDLLFKTNRKVTVKQLKEDYFKKIECFDSVEISGVEDRFNASLGTYHDLLKIIKDKDFLDNEENEDILEDIVLTLTLFEDREMIEERLKTYAHLFDDKVMKQLKRRRYTGWGRLSRKLINGIRDKQSGKTILDFLKSDGFANRNFMQLIHDDSLTFKEDIQKAQVSGQGDSLHEHIANLAGSPAIKKGILQTVKVVDELVKVMGRHKPENIVIEMARENQTTQKGQKNSRERMKRIEEGIKELGSQILKEHPVENTQLQNEKLYLYYLQNGRDMYVDQELDINRLSDYDVDAIVPQSFLKDDSIDNKVLTRSDKNRGKSDNVPSEEVVKKMKNYWRQLLNAKLITQRKFDNLTKAERGGLSELDKAGFIKRQLVETRQITKHVAQILDSRMNTKYDENDKLIREVKVITLKSKLVSDFRKDFQFYKVREINNYHHAHDAYLNAVVGTALIKKYPKLESEFVYGDYKVYDVRKMIAKSEQEIGKATAKYFFYSNIMNFFKTEITLANGEIRKRPLIETNGETGEIVWDKGRDFATVRKVLSMPQVNIVKKTEVQTGGFSKESILPKRNSDKLIARKKDWDPKKYGGFDSPTVAYSVLVVAKVEKGKSKKLKSVKELLGITIMERSSFEKNPIDFLEAKGYKEVKKDLIIKLPKYSLFELENGRKRMLASAGELQKGNELALPSKYVNFLYLASHYEKLKGSPEDNEQKQLFVEQHKHYLDEIIEQISEFSKRVILADANLDKVLSAYNKHRDKPIREQAENIIHLFTLTNLGAPAAFKYFDTTIDRKRYTSTKEVLDATLIHQSITGLYETRIDLSQLGGD

SEQ ID NO: 204 - protein, 345 aa, Sulfolobus islandicus
  REGION 1..345: note = MISC_FEATURE - tr|F0NN87|F0NN87_SULIHCRISPR-associatedCasx protein OS =Sulfolobus islandicus (strain HVE10/4) GN = SiH_0402 PE=4; SV = 1);CasX polypeptide sequence
MEVPLYNIFGDNYIIQVATEAENSTIYNNKVEIDDEELRNVLNLAYKIAKNNEDAAAERRGKAKKKKGEEGETTTSNIILPLSGNDKNPWTETLKCYNFPTTVALSEVFKNFSQVKECEEVSAPSFVKPEFYEFGRSPGMVERTRRVKLEVEPHYLIIAAAGWVLTRLGKAKVSEGDYVGVNVFTPTRGILYSLIQNVNGIVPGIKPETAFGLWIARKVVSSVTNPNVSVVRIYTISDAVGQNPTTINGGFSIDLTKLLEKRYLLSERLEAIARNALSISSNMRERYIVLANYIYEYLTGSKRLEDLLYFANRDLIMNLNSDDGKVRDLKLISAYVNGELIRGEG

SEQ ID NO: 205 - protein, 345 aa, Sulfolobus islandicus
  REGION 1..345: note = MISC_FEATURE - tr|F0NH53|F0NH53_SULIR CRISPR associated protein, Casx OS =Sulfolobus islandicus (strain REY15A) GN=SiRe_0771 PE=4 SV=1);CasX polypeptide sequence
MEVPLYNIFGDNYIIQVATEAENSTIYNNKVEIDDEELRNVLNLAYKIAKNNEDAAAERRGKAKKKKGEEGETTTSNIILPLSGNDKNPWTETLKCYNFPTTVALSEVFKNFSQVKECEEVSAPSFVKPEFYKFGRSPGMVERTRRVKLEVEPHYLIMAAAGWVLTRLGKAKVSEGDYVGVNVFTPTRGILYSLIQNVNGIVPGIKPETAFGLWIARKVVSSVTNPNVSVVSIYTISDAVGQNPTTINGGFSIDLTKLLEKRDLLSERLEAIARNALSISSNMRERYIVLANYIYEYLTGSKRLEDLLYFANRDLIMNLNSDDGKVRDLKLISAYVNGELIRGEG

SEQ ID NO: 206 - protein, 987 aa, unidentified
  REGION 1..987: note = MISC_FEATURE - CasX polypeptide sequence
MEKRINKIRKKLSADNATKPVSRSGPMKTLLVRVMTDDLKKRLEKRRKKPEVMPQVISNNAANNLRMLLDDYTKMKEAILQVYWQEFKDDHVGLMCKFAQPASKKIDQNKLKPEMDEKGNLTTAGFACSQCGQPLFVYKLEQVSEKGKAYTNYFGRCNVAEHEKLILLAQLKPVKDSDEAVTYSLGKFGQRALDFYSIHVTKESTHPVKPLAQIAGNRYASGPVGKALSDACMGTIASFLSKYQDIIIEHQKVVKGNQKRLESLRELAGKENLEYPSVTLPPQPHTKEGVDFAYNEVIARVRMWVNLNLWQKLKLSRDDAKPLLRLKGFPSFPVVERRENEVDWWNTINEVKKLIDAKRDMGRVFWSGVTAEKRNTILEGYNYLPNENDHKKREGSLENPKKPAKRQFGDLLLYLEKKYAGDWGKVFDEAWERIDKKIAGLTSHIEREEARNAEDAQSKAVLTDWLRAKASFVLERLKEMDEKEFYACEIQLQKWYGDLRGNPFAVEAENRVVDISGFSIGSDGHSIQYRNLLAWKYLENGKREFYLLMNYGKKGRIRFTDGTDIKKSGKWQGLLYGGGKAKVIDLTFDPDDEQLIILPLAFGTRQGREFIWNDLLSLETGLIKLANGRVIEKTIYNKKIGRDEPALFVALTFERREVVDPSNIKPVNLIGVARGENIPAVIALTDPEGCPLPEFKDSSGGPTDILRIGEGYKEKQRAIQAAKEVEQRRAGGYSRKFASKSRNLADDMVRNSARDLFYHAVTHDAVLVFANLSRGFGRQGKRTFMTERQYTKMEDWLTAKLAYEGLTSKTYLSKTLAQYTSKTCSNCGFTITYADMDVMLVRLKKTSDGWATTLNNKELKAEYQITYYNRYKRQTVEKELSAELDRLSEESGNNDISKWTKGRRDEALFLLKKRFSHRPVQEQFVCLDCGHEVHAAEQAALNIARSWLFLNSNSTEFKSYKSGKQPFVGAWQAFYKRRLKEVWKPNA

SEQ ID NO: 207 - protein, 1210 aa, unidentified
  REGION 1..1210: note = MISC_FEATURE - APG80656.1 CRISPR-associated protein CasY [uncultured Parcubacteria group bacterium]; CasY polypeptide sequence
MSKRHPRISGVKGYRLHAQRLEYTGKSGAMRTIKYPLYSSPSGGRTVPREIVSAINDDYVGLYGLSNFDDLYNAEKRNEEKVYSVLDFWYDCVQYGAVFSYTAPGLLKNVAEVRGGSYELTKTLKGSHLYDELQIDKVIKFLNKKEISRANGSLDKLKKDIIDCFKAEYRERHKDQCNKLADDIKNAKKDAGASLGERQKKLFRDFFGISEQSENDKPSFTNPLNLTCCLLPFDTVNNNRNRGEVLFNKLKEYAQKLDKNEGSLEMWEYIGIGNSGTAFSNFLGEGFLGRLRENKITELKKAMMDITDAWRGQEQEEELEKRLRILAALTIKLREPKFDNHWGGYRSDINGKLSSWLQNYINQTVKIKEDLKGHKKDLKKAKEMINRFGESDTKEEAVVSSLLESIEKIVPDDSADDEKPDIPAIAIYRRFLSDGRLTLNRFVQREDVQEALIKERLEAEKKKKPKKRKKKSDAEDEKETIDFKELFPHLAKPLKLVPNFYGDSKRELYKKYKNAAIYTDALWKAVEKIYKSAFSSSLKNSFFDTDFDKDFFIKRLQKIFSVYRRFNTDKWKPIVKNSFAPYCDIVSLAENEVLYKPKQSRSRKSAAIDKNRVRLPSTENIAKAGIALARELSVAGFDWKDLLKKEEHEEYIDLIELHKTALALLLAVTETQLDISALDFVENGTVKDFMKTRDGNLVLEGRFLEMFSQSIVFSELRGLAGLMSRKEFITRSAIQTMNGKQAELLYIPHEFQSAKITTPKEMSRAFLDLAPAEFATSLEPESLSEKSLLKLKQMRYYPHYFGYELTRTGQGIDGGVAENALRLEKSPVKKREIKCKQYKTLGRGQNKIVLYVRSSYYQTQFLEWFLHRPKNVQTDVAVSGSFLIDEKKVKTRWNYDALTVALEPVSGSERVFVSQPFTIFPEKSAEEEGQRYLGIDIGEYGIAYTALEITGDSAKILDQNFISDPQLKTLREEVKGLKLDQRRGTFAMPSTKIARIRESLVHSLRNRIHHLALKHKAKIVYELEVSRFEEGKQKIKKVYATLKKADVYSEIDADKNLQTTVWGKLAVASEISASYTSQFCGACKKLWRAEMQVDETITTQELIGTVRVIKGGTLIDAIKDFMRPPIFDENDTPFPKYRDFCDKHHISKKMRGNSCLFICPFCRANADADIQASQTIALLRYVKEEKKVEDYFERFRKLKNIKVLGQMKKI

SEQ ID NO: 208 - protein, 1082 aa, Neisseria meningitidis
  REGION 1..1082: note = MISC_FEATURE - NCBI Reference: WP_002235162.1; type II CRISPR RNA-guided endonuclease Cas9; Nme1Cas9 polypeptide sequence
MAAFKPNPINYILGLDIGIASVGWAMVEIDEDENPICLIDLGVRVFERAEVPKTGDSLAMARRLARSVRRLTRRRAHRLLRARRLLKREGVLQAADFDENGLIKSLPNTPWQLRAAALDRKLTPLEWSAVLLHLIKHRGYLSQRKNEGETADKELGALLKGVADNAHALQTGDFRTPAELALNKFEKESGHIRNQRGDYSHTFSRKDLQAELILLFEKQKEFGNPHVSGGLKEGIETLLMTQRPALSGDAVQKMLGHCTFEPAEPKAAKNTYTAERFIWLTKLNNLRILEQGSERPLTDTERATLMDEPYRKSKLTYAQARKLLGLEDTAFFKGLRYGKDNAEASTLMEMKAYHAISRALEKEGLKDKKSPLNLSPELQDEIGTAFSLFKTDEDITGRLKDRIQPEILEALLKHISFDKFVQISLKALRRIVPLMEQGKRYDEACAEIYGDHYGKKNTEEKIYLPPIPADEIRNPVVLRALSQARKVINGVVRRYGSPARIHIETAREVGKSFKDRKEIEKRQEENRKDREKAAAKFREYFPNFVGEPKSKDILKLRLYEQQHGKCLYSGKEINLGRLNEKGYVEIDHALPFSRTWDDSFNNKVLVLGSENQNKGNQTPYEYFNGKDNSREWQEFKARVETSRFPRSKKQRILLQKFDEDGFKERNLNDTRYVNRFLCQFVADRMRLTGKGKKRVFASNGQITNLLRGFWGLRKVRAENDRHHALDAVVVACSTVAMQQKITRFVRYKEMNAFDGKTIDKETGEVLHQKTHFPQPWEFFAQEVMIRVFGKPDGKPEFEEADTPEKLRTLLAEKLSSRPEAVHEYVTPLFVSRAPNRKMSGQGHMETVKSAKRLDEGVSVLRVPLTQLKLKDLEKMVNREREPKLYEALKARLEAHKDDPAKAFAEPFYKYDKAGNRTQQVKAVRVEQVQKTGVWVRNHNGIADNATMVRVDVFEKGDKYYLVPIYSWQVAKGILPDRAVVQGKDEEDWQLIDDSFNFKFSLHPNDLVEVITKKARMFGYFASCHRGTGNINIRIHDLDHKIGKNGILEGIGVKTALSFQKYQIDELGKEIRPCRLKKRPPVR

SEQ ID NO: 209 - protein, 1082 aa, Neisseria meningitidis
  REGION 1..1082: note = MISC_FEATURE - NCBI Reference: WP_002230835; type II CRISPR RNA-guided endonuclease Cas9; Nme2Cas9 polypeptide sequence
MAAFKPNPINYILGLDIGIASVGWAMVEIDEEENPIRLIDLGVRVFERAEVPKTGDSLAMARRLARSVRRLTRRRAHRLLRARRLLKREGVLQAADFDENGLIKSLPNTPWQLRAAALDRKLTPLEWSAVLLHLIKHRGYLSQRKNEGETADKELGALLKGVANNAHALQTGDFRTPAELALNKFEKESGHIRNQRGDYSHTFSRKDLQAELILLFEKQKEFGNPHVSGGLKEGIETLLMTQRPALSGDAVQKMLGHCTFEPAEPKAAKNTYTAERFIWLTKLNNLRILEQGSERPLTDTERATLMDEPYRKSKLTYAQARKLLGLEDTAFFKGLRYGKDNAEASTLMEMKAYHAISRALEKEGLKDKKSPLNLSSELQDEIGTAFSLFKTDEDITGRLKDRVQPEILEALLKHISFDKFVQISLKALRRIVPLMEQGKRYDEACAEIYGDHYGKKNTEEKIYLPPIPADEIRNPVVLRALSQARKVINGVVRRYGSPARIHIETAREVGKSFKDRKEIEKRQEENRKDREKAAAKFREYFPNFVGEPKSKDILKLRLYEQQHGKCLYSGKEINLVRLNEKGYVEIDHALPFSRTWDDSFNNKVLVLGSENQNKGNQTPYEYFNGKDNSREWQEFKARVETSRFPRSKKQRILLQKFDEDGFKECNLNDTRYVNRFLCQFVADHILLTGKGKRRVFASNGQITNLLRGFWGLRKVRAENDRHHALDAVVVACSTVAMQQKITRFVRYKEMNAFDGKTIDKETGKVLHQKTHFPQPWEFFAQEVMIRVFGKPDGKPEFEEADTPEKLRTLLAEKLSSRPEAVHEYVTPLFVSRAPNRKMSGAHKDTLRSAKRFVKHNEKISVKRVWLTEIKLADLENMVNYKNGREIELYEALKARLEAYGGNAKQAFDPKDNPFYKKGGQLVKAVRVEKTQESGVLLNKKNAYTIADNGDMVRVDVFCKVDKKGKNQYFIVPIYAWQVAENILPDIDCKGYRIDDSYTFCFSLHKYDLIAFQKDEKSKVEFAYYINCDSSNGRFYLAWHDKGSKEQQFRISTQNLVLIQKYQVNELGKEIRPCRLKKRPPVR

SEQ ID NO: 210 - protein, 1300 aa, Francisella novicida
  REGION 1..1300: note = MISC_FEATURE - wild type Cpf1 polypeptide sequence
MSIYQEFVNKYSLSKTLRFELIPQGKTLENIKARGLILDDEKRAKDYKKAKQIIDKYHQFFIEEILSSVCISEDLLQNYSDVYFKLKKSDDDNLQKDFKSAKDTIKKQISEYIKDSEKFKNLFNQNLIDAKKGQESDLILWLKQSKDNGIELFKANSDITDIDEALEIIKSFKGWTTYFKGFHENRKNVYSSNDIPTSIIYRIVDDNLPKFLENKAKYESLKDKAPEAINYEQIKKDLAEELTFDIDYKTSEVNQRVFSLDEVFEIANFNNYLNQSGITKFNTIIGGKFVNGENTKRKGINEYINLYSQQINDKTLKKYKMSVLFKQILSDTESKSFVIDKLEDDSDVVTTMQSFYEQIAAFKTVEEKSIKETLSLLFDDLKAQKLDLSKIYFKNDKSLTDLSQQVFDDYSVIGTAVLEYITQQIAPKNLDNPSKKEQELIAKKTEKAKYLSLETIKLALEEFNKHRDIDKQCRFEEILANFAAIPMIFDEIAQNKDNLAQISIKYQNQGKKDLLQASAEDDVKAIKDLLDQTNNLLHKLKIFHISQSEDKANILDKDEHFYLVFEECYFELANIVPLYNKIRNYITQKPYSDEKFKLNFENSTLANGWDKNKEPDNTAILFIKDDKYYLGVMNKKNNKIFDDKAIKENKGEGYKKIVYKLLPGANKMLPKVFFSAKSIKFYNPSEDILRIRNHSTHTKNGSPQKGYEKFEFNIEDCRKFIDFYKQSISKHPEWKDFGFRFSDTQRYNSIDEFYREVENQGYKLTFENISESYIDSVVNQGKLYLFQIYNKDFSAYSKGRPNLHTLYWKALFDERNLQDVVYKLNGEAELFYRKQSIPKKITHPAKEAIANKNKDNPKKESVFEYDLIKDKRFTEDKFFFHCPITINFKSSGANKFNDEINLLLKEKANDVHILSIDRGERHLAYYTLVDGKGNIIKQDTFNIIGNDRMKTNYHDKLAAIEKDRDSARKDWKKINNIKEMKEGYLSQVVHEIAKLVIEYNAIVVFEDLNFGFKRGRFKVEKQVYQKLEKMLIEKLNYLVFKDNEFDKTGGVLRAYQLTAPFETFKKMGKQTGIIYYVPAGFTSKICPVTGFVNQLYPKYESVSKSQEFFSKFDKICYNLDKGYFEFSFDYKNFGDKAAKGKWTIASFGSRLINFRNSDKNHNWDTREVYPTKELEKLLKDYSIEYGHGECIKAAICGESDKKFFAKLTSVLNTILQMRNSKTGTELDYLISPVADVNGNFFDSRQAPKNMPQDADANGAYHIGLKGLMLLGRIKNNQEGKKLNLVIKNEEYFEFVQNRNN

SEQ ID NO: 211 - protein, 1300 aa, Francisella novicida
  REGION 1..1300: note = MISC_FEATURE - Cpf1 D917A polypeptide sequence
MSIYQEFVNKYSLSKTLRFELIPQGKTLENIKARGLILDDEKRAKDYKKAKQIIDKYHQFFIEEILSSVCISEDLLQNYSDVYFKLKKSDDDNLQKDFKSAKDTIKKQISEYIKDSEKFKNLFNQNLIDAKKGQESDLILWLKQSKDNGIELFKANSDITDIDEALEIIKSFKGWTTYFKGFHENRKNVYSSNDIPTSIIYRIVDDNLPKFLENKAKYESLKDKAPEAINYEQIKKDLAEELTFDIDYKTSEVNQRVFSLDEVFEIANFNNYLNQSGITKFNTIIGGKFVNGENTKRKGINEYINLYSQQINDKTLKKYKMSVLFKQILSDTESKSFVIDKLEDDSDVVTTMQSFYEQIAAFKTVEEKSIKETLSLLFDDLKAQKLDLSKIYFKNDKSLTDLSQQVFDDYSVIGTAVLEYITQQIAPKNLDNPSKKEQELIAKKTEKAKYLSLETIKLALEEFNKHRDIDKQCRFEEILANFAAIPMIFDEIAQNKDNLAQISIKYQNQGKKDLLQASAEDDVKAIKDLLDQTNNLLHKLKIFHISQSEDKANILDKDEHFYLVFEECYFELANIVPLYNKIRNYITQKPYSDEKFKLNFENSTLANGWDKNKEPDNTAILFIKDDKYYLGVMNKKNNKIFDDKAIKENKGEGYKKIVYKLLPGANKMLPKVFFSAKSIKFYNPSEDILRIRNHSTHTKNGSPQKGYEKFEFNIEDCRKFIDFYKQSISKHPEWKDFGFRFSDTQRYNSIDEFYREVENQGYKLTFENISESYIDSVVNQGKLYLFQIYNKDFSAYSKGRPNLHTLYWKALFDERNLQDVVYKLNGEAELFYRKQSIPKKITHPAKEAIANKNKDNPKKESVFEYDLIKDKRFTEDKFFFHCPITINFKSSGANKFNDEINLLLKEKANDVHILSIARGERHLAYYTLVDGKGNIIKQDTFNIIGNDRMKTNYHDKLAAIEKDRDSARKDWKKINNIKEMKEGYLSQVVHEIAKLVIEYNAIVVFEDLNFGFKRGRFKVEKQVYQKLEKMLIEKLNYLVFKDNEFDKTGGVLRAYQLTAPFETFKKMGKQTGIIYYVPAGFTSKICPVTGFVNQLYPKYESVSKSQEFFSKFDKICYNLDKGYFEFSFDYKNFGDKAAKGKWTIASFGSRLINFRNSDKNHNWDTREVYPTKELEKLLKDYSIEYGHGECIKAAICGESDKKFFAKLTSVLNTILQMRNSKTGTELDYLISPVADVNGNFFDSRQAPKNMPQDADANGAYHIGLKGLMLLGRIKNNQEGKKLNLVIKNEEYFEFVQNRNN

SEQ ID NO: 212 - protein, 1300 aa, Francisella novicida
  REGION 1..1300: note = MISC_FEATURE - Cpf1 E1006A polypeptide sequence
MSIYQEFVNKYSLSKTLRFELIPQGKTLENIKARGLILDDEKRAKDYKKAKQIIDKYHQFFIEEILSSVCISEDLLQNYSDVYFKLKKSDDDNLQKDFKSAKDTIKKQISEYIKDSEKFKNLFNQNLIDAKKGQESDLILWLKQSKDNGIELFKANSDITDIDEALEIIKSFKGWTTYFKGFHENRKNVYSSNDIPTSIIYRIVDDNLPKFLENKAKYESLKDKAPEAINYEQIKKDLAEELTFDIDYKTSEVNQRVFSLDEVFEIANFNNYLNQSGITKFNTIIGGKFVNGENTKRKGINEYINLYSQQINDKTLKKYKMSVLFKQILSDTESKSFVIDKLEDDSDVVTTMQSFYEQIAAFKTVEEKSIKETLSLLFDDLKAQKLDLSKIYFKNDKSLTDLSQQVFDDYSVIGTAVLEYITQQIAPKNLDNPSKKEQELIAKKTEKAKYLSLETIKLALEEFNKHRDIDKQCRFEEILANFAAIPMIFDEIAQNKDNLAQISIKYQNQGKKDLLQASAEDDVKAIKDLLDQTNNLLHKLKIFHISQSEDKANILDKDEHFYLVFEECYFELANIVPLYNKIRNYITQKPYSDEKFKLNFENSTLANGWDKNKEPDNTAILFIKDDKYYLGVMNKKNNKIFDDKAIKENKGEGYKKIVYKLLPGANKMLPKVFFSAKSIKFYNPSEDILRIRNHSTHTKNGSPQKGYEKFEFNIEDCRKFIDFYKQSISKHPEWKDFGFRFSDTQRYNSIDEFYREVENQGYKLTFENISESYIDSVVNQGKLYLFQIYNKDFSAYSKGRPNLHTLYWKALFDERNLQDVVYKLNGEAELFYRKQSIPKKITHPAKEAIANKNKDNPKKESVFEYDLIKDKRFTEDKFFFHCPITINFKSSGANKFNDEINLLLKEKANDVHILSIDRGERHLAYYTLVDGKGNIIKQDTFNIIGNDRMKTNYHDKLAAIEKDRDSARKDWKKINNIKEMKEGYLSQVVHEIAKLVIEYNAIVVFADLNFGFKRGRFKVEKQVYQKLEKMLIEKLNYLVFKDNEFDKTGGVLRAYQLTAPFETFKKMGKQTGIIYYVPAGFTSKICPVTGFVNQLYPKYESVSKSQEFFSKFDKICYNLDKGYFEFSFDYKNFGDKAAKGKWTIASFGSRLINFRNSDKNHNWDTREVYPTKELEKLLKDYSIEYGHGECIKAAICGESDKKFFAKLTSVLNTILQMRNSKTGTELDYLISPVADVNGNFFDSRQAPKNMPQDADANGAYHIGLKGLMLLGRIKNNQEGKKLNLVIKNEEYFEFVQNRNN

SEQ ID NO: 213 - protein, 1300 aa, Francisella novicida
  REGION 1..1300: note = MISC_FEATURE - Cpf1 D1255A polypeptide sequence
MSIYQEFVNKYSLSKTLRFELIPQGKTLENIKARGLILDDEKRAKDYKKAKQIIDKYHQFFIEEILSSVCISEDLLQNYSDVYFKLKKSDDDNLQKDFKSAKDTIKKQISEYIKDSEKFKNLFNQNLIDAKKGQESDLILWLKQSKDNGIELFKANSDITDIDEALEIIKSFKGWTTYFKGFHENRKNVYSSNDIPTSIIYRIVDDNLPKFLENKAKYESLKDKAPEAINYEQIKKDLAEELTFDIDYKTSEVNQRVFSLDEVFEIANFNNYLNQSGITKFNTIIGGKFVNGENTKRKGINEYINLYSQQINDKTLKKYKMSVLFKQILSDTESKSFVIDKLEDDSDVVTTMQSFYEQIAAFKTVEEKSIKETLSLLFDDLKAQKLDLSKIYFKNDKSLTDLSQQVFDDYSVIGTAVLEYITQQIAPKNLDNPSKKEQELIAKKTEKAKYLSLETIKLALEEFNKHRDIDKQCRFEEILANFAAIPMIFDEIAQNKDNLAQISIKYQNQGKKDLLQASAEDDVKAIKDLLDQTNNLLHKLKIFHISQSEDKANILDKDEHFYLVFEECYFELANIVPLYNKIRNYITQKPYSDEKFKLNFENSTLANGWDKNKEPDNTAILFIKDDKYYLGVMNKKNNKIFDDKAIKENKGEGYKKIVYKLLPGANKMLPKVFFSAKSIKFYNPSEDILRIRNHSTHTKNGSPQKGYEKFEFNIEDCRKFIDFYKQSISKHPEWKDFGFRFSDTQRYNSIDEFYREVENQGYKLTFENISESYIDSVVNQGKLYLFQIYNKDFSAYSKGRPNLHTLYWKALFDERNLQDVVYKLNGEAELFYRKQSIPKKITHPAKEAIANKNKDNPKKESVFEYDLIKDKRFTEDKFFFHCPITINFKSSGANKFNDEINLLLKEKANDVHILSIDRGERHLAYYTLVDGKGNIIKQDTFNIIGNDRMKTNYHDKLAAIEKDRDSARKDWKKINNIKEMKEGYLSQVVHEIAKLVIEYNAIVVFEDLNFGFKRGRFKVEKQVYQKLEKMLIEKLNYLVFKDNEFDKTGGVLRAYQLTAPFETFKKMGKQTGIIYYVPAGFTSKICPVTGFVNQLYPKYESVSKSQEFFSKFDKICYNLDKGYFEFSFDYKNFGDKAAKGKWTIASFGSRLINFRNSDKNHNWDTREVYPTKELEKLLKDYSIEYGHGECIKAAICGESDKKFFAKLTSVLNTILQMRNSKTGTELDYLISPVADVNGNFFDSRQAPKNMPQDAAANGAYHIGLKGLMLLGRIKNNQEGKKLNLVIKNEEYFEFVQNRNN

SEQ ID NO: 214 - protein, 1300 aa, Francisella novicida
  REGION 1..1300: note = MISC_FEATURE - Cpf1 D917A/E1006A polypeptide sequence
MSIYQEFVNKYSLSKTLRFELIPQGKTLENIKARGLILDDEKRAKDYKKAKQIIDKYHQFFIEEILSSVCISEDLLQNYSDVYFKLKKSDDDNLQKDFKSAKDTIKKQISEYIKDSEKFKNLFNQNLIDAKKGQESDLILWLKQSKDNGIELFKANSDITDIDEALEIIKSFKGWTTYFKGFHENRKNVYSSNDIPTSIIYRIVDDNLPKFLENKAKYESLKDKAPEAINYEQIKKDLAEELTFDIDYKTSEVNQRVFSLDEVFEIANFNNYLNQSGITKFNTIIGGKFVNGENTKRKGINEYINLYSQQINDKTLKKYKMSVLFKQILSDTESKSFVIDKLEDDSDVVTTMQSFYEQIAAFKTVEEKSIKETLSLLFDDLKAQKLDLSKIYFKNDKSLTDLSQQVFDDYSVIGTAVLEYITQQIAPKNLDNPSKKEQELIAKKTEKAKYLSLETIKLALEEFNKHRDIDKQCRFEEILANFAAIPMIFDEIAQNKDNLAQISIKYQNQGKKDLLQASAEDDVKAIKDLLDQTNNLLHKLKIFHISQSEDKANILDKDEHFYLVFEECYFELANIVPLYNKIRNYITQKPYSDEKFKLNFENSTLANGWDKNKEPDNTAILFIKDDKYYLGVMNKKNNKIFDDKAIKENKGEGYKKIVYKLLPGANKMLPKVFFSAKSIKFYNPSEDILRIRNHSTHTKNGSPQKGYEKFEFNIEDCRKFIDFYKQSISKHPEWKDFGFRFSDTQRYNSIDEFYREVENQGYKLTFENISESYIDSVVNQGKLYLFQIYNKDFSAYSKGRPNLHTLYWKALFDERNLQDVVYKLNGEAELFYRKQSIPKKITHPAKEAIANKNKDNPKKESVFEYDLIKDKRFTEDKFFFHCPITINFKSSGANKFNDEINLLLKEKANDVHILSIARGERHLAYYTLVDGKGNIIKQDTFNIIGNDRMKTNYHDKLAAIEKDRDSARKDWKKINNIKEMKEGYLSQVVHEIAKLVIEYNAIVVFADLNFGFKRGRFKVEKQVYQKLEKMLIEKLNYLVFKDNEFDKTGGVLRAYQLTAPFETFKKMGKQTGIIYYVPAGFTSKICPVTGFVNQLYPKYESVSKSQEFFSKFDKICYNLDKGYFEFSFDYKNFGDKAAKGKWTIASFGSRLINFRNSDKNHNWDTREVYPTKELEKLLKDYSIEYGHGECIKAAICGESDKKFFAKLTSVLNTILQMRNSKTGTELDYLISPVADVNGNFFDSRQAPKNMPQDADANGAYHIGLKGLMLLGRIKNNQEGKKLNLVIKNEEYFEFVQNRNN

SEQ ID NO: 215 - protein, 1300 aa, Francisella novicida
  REGION 1..1300: note = MISC_FEATURE - Cpf1 D917A/D1255A polypeptide sequence
MSIYQEFVNKYSLSKTLRFELIPQGKTLENIKARGLILDDEKRAKDYKKAKQIIDKYHQFFIEEILSSVCISEDLLQNYSDVYFKLKKSDDDNLQKDFKSAKDTIKKQISEYIKDSEKFKNLFNQNLIDAKKGQESDLILWLKQSKDNGIELFKANSDITDIDEALEIIKSFKGWTTYFKGFHENRKNVYSSNDIPTSIIYRIVDDNLPKFLENKAKYESLKDKAPEAINYEQIKKDLAEELTFDIDYKTSEVNQRVFSLDEVFEIANFNNYLNQSGITKFNTIIGGKFVNGENTKRKGINEYINLYSQQINDKTLKKYKMSVLFKQILSDTESKSFVIDKLEDDSDVVTTMQSFYEQIAAFKTVEEKSIKETLSLLFDDLKAQKLDLSKIYFKNDKSLTDLSQQVFDDYSVIGTAVLEYITQQIAPKNLDNPSKKEQELIAKKTEKAKYLSLETIKLALEEFNKHRDIDKQCRFEEILANFAAIPMIFDEIAQNKDNLAQISIKYQNQGKKDLLQASAEDDVKAIKDLLDQTNNLLHKLKIFHISQSEDKANILDKDEHFYLVFEECYFELANIVPLYNKIRNYITQKPYSDEKFKLNFENSTLANGWDKNKEPDNTAILFIKDDKYYLGVMNKKNNKIFDDKAIKENKGEGYKKIVYKLLPGANKMLPKVFFSAKSIKFYNPSEDILRIRNHSTHTKNGSPQKGYEKFEFNIEDCRKFIDFYKQSISKHPEWKDFGFRFSDTQRYNSIDEFYREVENQGYKLTFENISESYIDSVVNQGKLYLFQIYNKDFSAYSKGRPNLHTLYWKALFDERNLQDVVYKLNGEAELFYRKQSIPKKITHPAKEAIANKNKDNPKKESVFEYDLIKDKRFTEDKFFFHCPITINFKSSGANKFNDEINLLLKEKANDVHILSIARGERHLAYYTLVDGKGNIIKQDTFNIIGNDRMKTNYHDKLAAIEKDRDSARKDWKKINNIKEMKEGYLSQVVHEIAKLVIEYNAIVVFEDLNFGFKRGRFKVEKQVYQKLEKMLIEKLNYLVFKDNEFDKTGGVLRAYQLTAPFETFKKMGKQTGIIYYVPAGFTSKICPVTGFVNQLYPKYESVSKSQEFFSKFDKICYNLDKGYFEFSFDYKNFGDKAAKGKWTIASFGSRLINFRNSDKNHNWDTREVYPTKELEKLLKDYSIEYGHGECIKAAICGESDKKFFAKLTSVLNTILQMRNSKTGTELDYLISPVADVNGNFFDSRQAPKNMPQDAAANGAYHIGLKGLMLLGRIKNNQEGKKLNLVIKNEEYFEFVQNRNN

SEQ ID NO: 216 - protein, 1300 aa, Francisella novicida
  REGION 1..1300: note = MISC_FEATURE - Cpf1 E1006A/D1255A polypeptide sequence
MSIYQEFVNKYSLSKTLRFELIPQGKTLENIKARGLILDDEKRAKDYKKAKQIIDKYHQFFIEEILSSVCISEDLLQNYSDVYFKLKKSDDDNLQKDFKSAKDTIKKQISEYIKDSEKFKNLFNQNLIDAKKGQESDLILWLKQSKDNGIELFKANSDITDIDEALEIIKSFKGWTTYFKGFHENRKNVYSSNDIPTSIIYRIVDDNLPKFLENKAKYESLKDKAPEAINYEQIKKDLAEELTFDIDYKTSEVNQRVFSLDEVFEIANFNNYLNQSGITKFNTIIGGKFVNGENTKRKGINEYINLYSQQINDKTLKKYKMSVLFKQILSDTESKSFVIDKLEDDSDVVTTMQSFYEQIAAFKTVEEKSIKETLSLLFDDLKAQKLDLSKIYFKNDKSLTDLSQQVFDDYSVIGTAVLEYITQQIAPKNLDNPSKKEQELIAKKTEKAKYLSLETIKLALEEFNKHRDIDKQCRFEEILANFAAIPMIFDEIAQNKDNLAQISIKYQNQGKKDLLQASAEDDVKAIKDLLDQTNNLLHKLKIFHISQSEDKANILDKDEHFYLVFEECYFELANIVPLYNKIRNYITQKPYSDEKFKLNFENSTLANGWDKNKEPDNTAILFIKDDKYYLGVMNKKNNKIFDDKAIKENKGEGYKKIVYKLLPGANKMLPKVFFSAKSIKFYNPSEDILRIRNHSTHTKNGSPQKGYEKFEFNIEDCRKFIDFYKQSISKHPEWKDFGFRFSDTQRYNSIDEFYREVENQGYKLTFENISESYIDSVVNQGKLYLFQIYNKDFSAYSKGRPNLHTLYWKALFDERNLQDVVYKLNGEAELFYRKQSIPKKITHPAKEAIANKNKDNPKKESVFEYDLIKDKRFTEDKFFFHCPITINFKSSGANKFNDEINLLLKEKANDVHILSIDRGERHLAYYTLVDGKGNIIKQDTFNIIGNDRMKTNYHDKLAAIEKDRDSARKDWKKINNIKEMKEGYLSQVVHEIAKLVIEYNAIVVFADLNFGFKRGRFKVEKQVYQKLEKMLIEKLNYLVFKDNEFDKTGGVLRAYQLTAPFETFKKMGKQTGIIYYVPAGFTSKICPVTGFVNQLYPKYESVSKSQEFFSKFDKICYNLDKGYFEFSFDYKNFGDKAAKGKWTIASFGSRLINFRNSDKNHNWDTREVYPTKELEKLLKDYSIEYGHGECIKAAICGESDKKFFAKLTSVLNTILQMRNSKTGTELDYLISPVADVNGNFFDSRQAPKNMPQDAAANGAYHIGLKGLMLLGRIKNNQEGKKLNLVIKNEEYFEFVQNRNN

SEQ ID NO: 217 - protein, 1300 aa, Francisella novicida
  REGION 1..1300: note = MISC_FEATURE - Cpf1 D917A/E1006A/D1255A polypeptide sequence
MSIYQEFVNKYSLSKTLRFELIPQGKTLENIKARGLILDDEKRAKDYKKAKQIIDKYHQFFIEEILSSVCISEDLLQNYSDVYFKLKKSDDDNLQKDFKSAKDTIKKQISEYIKDSEKFKNLFNQNLIDAKKGQESDLILWLKQSKDNGIELFKANSDITDIDEALEIIKSFKGWTTYFKGFHENRKNVYSSNDIPTSIIYRIVDDNLPKFLENKAKYESLKDKAPEAINYEQIKKDLAEELTFDIDYKTSEVNQRVFSLDEVFEIANFNNYLNQSGITKFNTIIGGKFVNGENTKRKGINEYINLYSQQINDKTLKKYKMSVLFKQILSDTESKSFVIDKLEDDSDVVTTMQSFYEQIAAFKTVEEKSIKETLSLLFDDLKAQKLDLSKIYFKNDKSLTDLSQQVFDDYSVIGTAVLEYITQQIAPKNLDNPSKKEQELIAKKTEKAKYLSLETIKLALEEFNKHRDIDKQCRFEEILANFAAIPMIFDEIAQNKDNLAQISIKYQNQGKKDLLQASAEDDVKAIKDLLDQTNNLLHKLKIFHISQSEDKANILDKDEHFYLVFEECYFELANIVPLYNKIRNYITQKPYSDEKFKLNFENSTLANGWDKNKEPDNTAILFIKDDKYYLGVMNKKNNKIFDDKAIKENKGEGYKKIVYKLLPGANKMLPKVFFSAKSIKFYNPSEDILRIRNHSTHTKNGSPQKGYEKFEFNIEDCRKFIDFYKQSISKHPEWKDFGFRFSDTQRYNSIDEFYREVENQGYKLTFENISESYIDSVVNQGKLYLFQIYNKDFSAYSKGRPNLHTLYWKALFDERNLQDVVYKLNGEAELFYRKQSIPKKITHPAKEAIANKNKDNPKKESVFEYDLIKDKRFTEDKFFFHCPITINFKSSGANKFNDEINLLLKEKANDVHILSIARGERHLAYYTLVDGKGNIIKQDTFNIIGNDRMKTNYHDKLAAIEKDRDSARKDWKKINNIKEMKEGYLSQVVHEIAKLVIEYNAIVVFADLNFGFKRGRFKVEKQVYQKLEKMLIEKLNYLVFKDNEFDKTGGVLRAYQLTAPFETFKKMGKQTGIIYYVPAGFTSKICPVTGFVNQLYPKYESVSKSQEFFSKFDKICYNLDKGYFEFSFDYKNFGDKAAKGKWTIASFGSRLINFRNSDKNHNWDTREVYPTKELEKLLKDYSIEYGHGECIKAAICGESDKKFFAKLTSVLNTILQMRNSKTGTELDYLISPVADVNGNFFDSRQAPKNMPQDAAANGAYHIGLKGLMLLGRIKNNQEGKKLNLVIKNEEYFEFVQNRNN

SEQ ID NO: 218 - protein, 1052 aa, Staphylococcus aureus
  REGION 1..1052: note = MISC_FEATURE - Exemplary SaCas9 polypeptide sequence
KRNYILGLDIGITSVGYGIIDYETRDVIDAGVRLFKEANVENNEGRRSKRGARRLKRRRRHRIQRVKKLLFDYNLLTDHSELSGINPYEARVKGLSQKLSEEEFSAALLHLAKRRGVHNVNEVEEDTGNELSTKEQISRNSKALEEKYVAELQLERLKKDGEVRGSINRFKTSDYVKEAKQLLKVQKAYHQLDQSFIDTYIDLLETRRTYYEGPGEGSPFGWKDIKEWYEMLMGHCTYFPEELRSVKYAYNADLYNALNDLNNLVITRDENEKLEYYEKFQIIENVFKQKKKPTLKQIAKEILVNEEDIKGYRVTSTGKPEFTNLKVYHDIKDITARKEIIENAELLDQIAKILTIYQSSEDIQEELTNLNSELTQEEIEQISNLKGYTGTHNLSLKAINLILDELWHTNDNQIAIFNRLKLVPKKVDLSQQKEIPTTLVDDFILSPVVKRSFIQSIKVINAIIKKYGLPNDIIIELAREKNSKDAQKMINEMQKRNRQTNERIEEIIRTTGKENAKYLIEKIKLHDMQEGKCLYSLEAIPLEDLLNNPFNYEVDHIIPRSVSFDNSFNNKVLVKQEENSKKGNRTPFQYLSSSDSKISYETFKKHILNLAKGKGRISKTKKEYLLEERDINRFSVQKDFINRNLVDTRYATRGLMNLLRSYFRVNNLDVKVKSINGGFTSFLRRKWKFKKERNKGYKHHAEDALIIANADFIFKEWKKLDKAKKVMENQMFEEKQAESMPEIETEQEYKEIFITPHQIKHIKDFKDYKYSHRVDKKPNRELINDTLYSTRKDDKGNTLIVNNLNGLYDKDNDKLKKLINKSPEKLLMYHHDPQTYQKLKLIMEQYGDEKNPLYKYYEETGNYLTKYSKKDNGPVIKKIKYYGNKLNAHLDITDDYPNSRNKVVKLSLKPYRFDVYLDNGVYKFVTVKNLDVIKKENYYEVNSKCYEEAKKLKKISNQAEFIASFYNNDLIKINGELYRVIGVNNDLLNRIEVNMIDITYREYLENMNDKRPPRIIKTIASKTQSIKKYSTDILGNLYEVKSKKHPQIIKKG

SEQ ID NO: 219 - protein, 1052 aa, Staphylococcus aureus
  REGION 1..1052: note = MISC_FEATURE - SaCas9n polypeptide sequence
KRNYILGLDIGITSVGYGIIDYETRDVIDAGVRLFKEANVENNEGRRSKRGARRLKRRRRHRIQRVKKLLFDYNLLTDHSELSGINPYEARVKGLSQKLSEEEFSAALLHLAKRRGVHNVNEVEEDTGNELSTKEQISRNSKALEEKYVAELQLERLKKDGEVRGSINRFKTSDYVKEAKQLLKVQKAYHQLDQSFIDTYIDLLETRRTYYEGPGEGSPFGWKDIKEWYEMLMGHCTYFPEELRSVKYAYNADLYNALNDLNNLVITRDENEKLEYYEKFQIIENVFKQKKKPTLKQIAKEILVNEEDIKGYRVTSTGKPEFTNLKVYHDIKDITARKEIIENAELLDQIAKILTIYQSSEDIQEELTNLNSELTQEEIEQISNLKGYTGTHNLSLKAINLILDELWHTNDNQIAIFNRLKLVPKKVDLSQQKEIPTTLVDDFILSPVVKRSFIQSIKVINAIIKKYGLPNDIIIELAREKNSKDAQKMINEMQKRNRQTNERIEEIIRTTGKENAKYLIEKIKLHDMQEGKCLYSLEAIPLEDLLNNPFNYEVDHIIPRSVSFDNSFNNKVLVKQEEASKKGNRTPFQYLSSSDSKISYETFKKHILNLAKGKGRISKTKKEYLLEERDINRFSVQKDFINRNLVDTRYATRGLMNLLRSYFRVNNLDVKVKSINGGFTSFLRRKWKFKKERNKGYKHHAEDALIIANADFIFKEWKKLDKAKKVMENQMFEEKQAESMPEIETEQEYKEIFITPHQIKHIKDFKDYKYSHRVDKKPNRELINDTLYSTRKDDKGNTLIVNNLNGLYDKDNDKLKKLINKSPEKLLMYHHDPQTYQKLKLIMEQYGDEKNPLYKYYEETGNYLTKYSKKDNGPVIKKIKYYGNKLNAHLDITDDYPNSRNKVVKLSLKPYRFDVYLDNGVYKFVTVKNLDVIKKENYYEVNSKCYEEAKKLKKISNQAEFIASFYNNDLIKINGELYRVIGVNNDLLNRIEVNMIDITYREYLENMNDKRPPRIIKTIASKTQSIKKYSTDILGNLYEVKSKKHPQIIKKG

SEQ ID NO: 220 - protein, 1052 aa, Staphylococcus aureus
  REGION 1..1052: note = MISC_FEATURE - SaKKH Cas9 polypeptide sequence
KRNYILGLDIGITSVGYGIIDYETRDVIDAGVRLFKEANVENNEGRRSKRGARRLKRRRRHRIQRVKKLLFDYNLLTDHSELSGINPYEARVKGLSQKLSEEEFSAALLHLAKRRGVHNVNEVEEDTGNELSTKEQISRNSKALEEKYVAELQLERLKKDGEVRGSINRFKTSDYVKEAKQLLKVQKAYHQLDQSFIDTYIDLLETRRTYYEGPGEGSPFGWKDIKEWYEMLMGHCTYFPEELRSVKYAYNADLYNALNDLNNLVITRDENEKLEYYEKFQIIENVFKQKKKPTLKQIAKEILVNEEDIKGYRVTSTGKPEFTNLKVYHDIKDITARKEIIENAELLDQIAKILTIYQSSEDIQEELTNLNSELTQEEIEQISNLKGYTGTHNLSLKAINLILDELWHTNDNQIAIFNRLKLVPKKVDLSQQKEIPTTLVDDFILSPVVKRSFIQSIKVINAIIKKYGLPNDIIIELAREKNSKDAQKMINEMQKRNRQTNERIEEIIRTTGKENAKYLIEKIKLHDMQEGKCLYSLEAIPLEDLLNNPFNYEVDHIIPRSVSFDNSFNNKVLVKQEEASKKGNRTPFQYLSSSDSKISYETFKKHILNLAKGKGRISKTKKEYLLEERDINRFSVQKDFINRNLVDTRYATRGLMNLLRSYFRVNNLDVKVKSINGGFTSFLRRKWKFKKERNKGYKHHAEDALIIANADFIFKEWKKLDKAKKVMENQMFEEKQAESMPEIETEQEYKEIFITPHQIKHIKDFKDYKYSHRVDKKPNRKLINDTLYSTRKDDKGNTLIVNNLNGLYDKDNDKLKKLINKSPEKLLMYHHDPQTYQKLKLIMEQYGDEKNPLYKYYEETGNYLTKYSKKDNGPVIKKIKYYGNKLNAHLDITDDYPNSRNKVVKLSLKPYRFDVYLDNGVYKFVTVKNLDVIKKENYYEVNSKCYEEAKKLKKISNQAEFIASFYKNDLIKINGELYRVIGVNNDLLNRIEVNMIDITYREYLENMNDKRPPHIIKTIASKTQSIKKYSTDILGNLYEVKSKKHPQIIKKG

SEQ ID NO: 221 - protein, 707 aa, synthetic construct
  REGION 1..707: note = Casphi-1 polypeptide sequence
MADTPTLFTQFLRHHLPGQRFRKDILKQAGRILANKGEDATIAFLRGKSEESPPDFQPPVKCPIIACSRPLTEWPIYQASVAIQGYVYGQSLAEFEASDPGCSKDGLLGWFDKTGVCTDYFSVQGLNLIFQNARKRYIGVQTKVTNRNEKRHKKLKRINAKRIAEGLPELTSDEPESALDETGHLIDPPGLNTNIYCYQQVSPKPLALSEVNQLPTAYAGYSTSGDDPIQPMVTKDRLSISKGQPGYIPEHQRALLSQKKHRRMRGYGLKARALLVIVRIQDDWAVIDLRSLLRNAYWRRIVQTKEPSTITKLLKLVTGDPVLDATRMVATFTYKPGIVQVRSAKCLKNKQGSKLFSERYLNETVSVTSIDLGSNNLVAVATYRLVNGNTPELLQRFTLPSHLVKDFERYKQAHDTLEDSIQKTAVASLPQGQQTEIRMWSMYGFREAQERVCQELGLADGSIPWNVMTATSTILTDLFLARGGDPKKCMFTSEPKKKKNSKQVLYKIRDRAWAKMYRTLLSKETREAWNKALWGLKRGSPDYARLSKRKEELARRCVNYTISTAEKRAQCGRTIVALEDLNIGFFHGRGKQEPGWVGLFTRKKENRWLMQALHKAFLELAHHRGYHVIEVNPAYTSQTCPVCRHCDPDNRDQHNREAFHCIGCGFRGNADLDVATHNIAMVAITGESLKRARGSVASKTPQPLAAE

SEQ ID NO: 222 - protein, 757 aa, synthetic construct
  REGION 1..757: note = Casphi-2 polypeptide sequence
MPKPAVESEFSKVLKKHFPGERFRSSYMKRGGKILAAQGEEAVVAYLQGKSEEEPPNFQPPAKCHVVTKSRDFAEWPIMKASEAIQRYIYALSTTERAACKPGKSSESHAAWFAATGVSNHGYSHVQGLNLIFDHTLGRYDGVLKKVQLRNEKARARLESINASRADEGLPEIKAEEEEVATNETGHLLQPPGINPSFYVYQTISPQAYRPRDEIVLPPEYAGYVRDPNAPIPLGVVRNRCDIQKGCPGYIPEWQREAGTAISPKTGKAVTVPGLSPKKNKRMRRYWRSEKEKAQDALLVTVRIGTDWVVIDVRGLLRNARWRTIAPKDISLNALLDLFTGDPVIDVRRNIVTFTYTLDACGTYARKWTLKGKQTKATLDKLTATQTVALVAIDLGQTNPISAGISRVTQENGALQCEPLDRFTLPDDLLKDISAYRIAWDRNEEELRARSVEALPEAQQAEVRALDGVSKETARTQLCADFGLDPKRLPWDKMSSNTTFISEALLSNSVSRDQVFFTPAPKKGAKKKAPVEVMRKDRTWARAYKPRLSVEAQKLKNEALWALKRTSPEYLKLSRRKEELCRRSINYVIEKTRRRTQCQIVIPVIEDLNVRFFHGSGKRLPGWDNFFTAKKENRWFIQGLHKAFSDLRTHRSFYVFEVRPERTSITCPKCGHCEVGNRDGEAFQCLSCGKTCNADLDVATHNLTQVALTGKTMPKREEPRDAQGTAPARKTKKASKSKAPPAEREDQTPAQEPSQTS

SEQ ID NO: 223 - protein, 766 aa, synthetic construct
  REGION 1..766: note = Casphi-3 polypeptide sequence
MEKEITELTKIRREFPNKKFSSTDMKKAGKLLKAEGPDAVRDFLNSCQEIIGDFKPPVKTNIVSISRPFEEWPVSMVGRAIQEYYFSLTKEELESVHPGTSSEDHKSFFNITGLSNYNYTSVQGLNLIFKNAKAIYDGTLVKANNKNKKLEKKFNEINHKRSLEGLPIITPDFEEPFDENGHLNNPPGINRNIYGYQGCAAKVFVPSKHKMVSLPKEYEGYNRDPNLSLAGFRNRLEIPEGEPGHVPWFQRMDIPEGQIGHVNKIQRFNFVHGKNSGKVKFSDKTGRVKRYHHSKYKDATKPYKFLEESKKVSALDSILAIITIGDDWVVFDIRGLYRNVFYRELAQKGLTAVQLLDLFTGDPVIDPKKGVVTFSYKEGVVPVFSQKIVPRFKSRDTLEKLTSQGPVALLSVDLGQNEPVAARVCSLKNINDKITLDNSCRISFLDDYKKQIKDYRDSLDELEIKIRLEAINSLETNQQVEIRDLDVFSADRAKANTVDMFDIDPNLISWDSMSDARVSTQISDLYLKNGGDESRVYFEINNKRIKRSDYNISQLVRPKLSDSTRKNLNDSIWKLKRTSEEYLKLSKRKLELSRAVVNYTIRQSKLLSGINDIVIILEDLDVKKKFNGRGIRDIGWDNFFSSRKENRWFIPAFHKAFSELSSNRGLCVIEVNPAWTSATCPDCGFCSKENRDGINFTCRKCGVSYHADIDVATLNIARVAVLGKPMSGPADRERLGDTKKPRVARSRKTMKRKDISNSTVEAMVTA

SEQ ID NO: 224 - protein, 765 aa, synthetic construct
  REGION 1..765: note = Casphi-4 polypeptide sequence
MYSLEMADLKSEPSLLAKLLRDRFPGKYWLPKYWKLAEKKRLTGGEEAACEYMADKQLDSPPPNFRPPARCVILAKSRPFEDWPVHRVASKAQSFVIGLSEQGFAALRAAPPSTADARRDWLRSHGASEDDLMALEAQLLETIMGNAISLHGGVLKKIDNANVKAAKRLSGRNEARLNKGLQELPPEQEGSAYGADGLLVNPPGLNLNIYCRKSCCPKPVKNTARFVGHYPGYLRDSDSILISGTMDRLTIIEGMPGHIPAWQREQGLVKPGGRRRRLSGSESNMRQKVDPSTGPRRSTRSGTVNRSNQRTGRNGDPLLVEIRMKEDWVLLDARGLLRNLRWRESKRGLSCDHEDLSLSGLLALFSGDPVIDPVRNEVVFLYGEGIIPVRSTKPVGTRQSKKLLERQASMGPLTLISCDLGQTNLIAGRASAISLTHGSLGVRSSVRIELDPEIIKSFERLRKDADRLETEILTAAKETLSDEQRGEVNSHEKDSPQTAKASLCRELGLHPPSLPWGQMGPSTTFIADMLISHGRDDDAFLSHGEFPTLEKRKKFDKRFCLESRPLLSSETRKALNESLWEVKRTSSEYARLSQRKKEMARRAVNFVVEISRRKTGLSNVIVNIEDLNVRIFHGGGKQAPGWDGFFRPKSENRWFIQAIHKAFSDLAAHHGIPVIESDPQRTSMTCPECGHCDSKNRNGVRFLCKGCGASMDADFDAACRNLERVALTGKPMPKPSTSCERLLSATTGKVCSDHSLSHDAIEKAS

SEQ ID NO: 225 - protein, 793 aa, synthetic construct
  REGION 1..793: note = Casphi-5 polypeptide sequence
MSSLPTPLELLKQKHADLFKGLQFSSKDNKMAGKVLKKDGEEAALAFLSERGVSRGELPNFRPPAKTLVVAQSRPFEEFPIYRVSEAIQLYVYSLSVKELETVPSGSSTKKEHQRFFQDSSVPDFGYTSVQGLNKIFGLARGIYLGVITRGENQLQKAKSKHEALNKKRRASGEAETEFDPTPYEYMTPERKLAKPPGVNHSIMCYVDISVDEFDFRNPDGIVLPSEYAGYCREINTAIEKGTVDRLGHLKGGPGYIPGHQRKESTTEGPKINFRKGRIRRSYTALYAKRDSRRVRQGKLALPSYRHHMMRLNSNAESAILAVIFFGKDWVVFDLRGLLRNVRWRNLFVDGSTPSTLLGMFGDPVIDPKRGVVAFCYKEQIVPVVSKSITKMVKAPELLNKLYLKSEDPLVLVAIDLGQTNPVGVGVYRVMNASLDYEVVTRFALESELLREIESYRQRTNAFEAQIRAETFDAMTSEEQEEITRVRAFSASKAKENVCHRFGMPVDAVDWATMGSNTIHIAKWVMRHGDPSLVEVLEYRKDNEIKLDKNGVPKKVKLTDKRIANLTSIRLRFSQETSKHYNDTMWELRRKHPVYQKLSKSKADFSRRVVNSIIRRVNHLVPRARIVFIIEDLKNLGKVFHGSGKRELGWDSYFEPKSENRWFIQVLHKAFSETGKHKGYYIIECWPNWTSCTCPKCSCCDSENRHGEVFRCLACGYTCNTDFGTAPDNLVKIATTGKGLPGPKKRCKGSSKGKNPKIARSSETGVSVTESGAPKVKKSSPTQTSQSSSQSAP

SEQ ID NO: 226 - protein, 441 aa, synthetic construct
  REGION 1..441: note = Casphi-6 polypeptide sequence
MNKIEKEKTPLAKLMNENFAGLRFPFAIIKQAGKKLLKEGELKTIEYMTGKGSIEPLPNFKPPVKCLIVAKRRDLKYFPICKASCEIQSYVYSLNYKDFMDYFSTPMTSQKQHEEFFKKSGLNIEYQNVAGLNLIFNNVKNTYNGVILKVKNRNEKLKKKAIKNNYEFEEIKTFNDDGCLINKPGINNVIYCFQSISPKILKNITHLPKEYNDYDCSVDRNIIQKYVSRLDIPESQPGHVPEWQRKLPEFNNTNNPRRRRKWYSNGRNISKGYSVDQVNQAKIEDSLLAQIKIGEDWIILDIRGLLRDLNRRELISYKNKLTIKDVLGFFSDYPIIDIKKNLVTFCYKEGVIQVVSQKSIGNKKSKQLLEKLIENKPIALVSIDLGQTNPVSVKISKLNKINNKISIESFTYRFLNEEILKEIEKYRKDYDKLELKLINEA

SEQ ID NO: 227 - protein, 772 aa, synthetic construct
  REGION 1..772: note = Casphi-7 polypeptide sequence
MSNTAVSTREHMSNKTTPPSPLSLLLRAHFPGLKFESQDYKIAGKKLRDGGPEAVISYLTGKGQAKLKDVKPPAKAFVIAQSRPFIEWDLVRVSRQIQEKIFGIPATKGRPKQDGLSETAFNEAVASLEVDGKSKLNEETRAAFYEVLGLDAPSLHAQAQNALIKSAISIREGVLKKVENRNEKNLSKTKRRKEAGEEATFVEEKAHDERGYLIHPPGVNQTIPGYQAVVIKSCPSDFIGLPSGCLAKESAEALTDYLPHDRMTIPKGQPGYVPEWQHPLLNRRKNRRRRDWYSASLNKPKATCSKRSGTPNRKNSRTDQIQSGRFKGAIPVLMRFQDEWVIIDIRGLLRNARYRKLLKEKSTIPDLLSLFTGDPSIDMRQGVCTFIYKAGQACSAKMVKTKNAPEILSELTKSGPVVLVSIDLGQTNPIAAKVSRVTQLSDGQLSHETLLRELLSNDSSDGKEIARYRVASDRLRDKLANLAVERLSPEHKSEILRAKNDTPALCKARVCAALGLNPEMIAWDKMTPYTEFLATAYLEKGGDRKVATLKPKNRPEMLRRDIKFKGTEGVRIEVSPEAAEAYREAQWDLQRTSPEYLRLSTWKQELTKRILNQLRHKAAKSSQCEVVVMAFEDLNIKMMHGNGKWADGGWDAFFIKKRENRWFMQAFHKSLTELGAHKGVPTIEVTPHRTSITCTKCGHCDKANRDGERFACQKCGFVAHADLEIATDNIERVALTGKPMPKPESERSGDAKKSVGARKAAFKPEEDAEAAE

SEQ ID NO: 228 - protein, 717 aa, synthetic construct
  REGION 1..717: note = Casphi-8 polypeptide sequence
MIKPTVSQFLTPGFKLIRNHSRTAGLKLKNEGEEACKKFVRENEIPKDECPNFQGGPAIANIIAKSREFTEWEIYQSSLAIQEVIFTLPKDKLPEPILKEEWRAQWLSEHGLDTVPYKEAAGLNLIIKNAVNTYKGVQVKVDNKNKNNLAKINRKNEIAKLNGEQEISFEEIKAFDDKGYLLQKPSPNKSIYCYQSVSPKPFITSKYHNVNLPEEYIGYYRKSNEPIVSPYQFDRLRIPIGEPGYVPKWQYTFLSKKENKRRKLSKRIKNVSPILGIICIKKDWCVFDMRGLLRTNHWKKYHKPTDSINDLFDYFTGDPVIDTKANVVRFRYKMENGIVNYKPVREKKGKELLENICDQNGSCKLATVDVGQNNPVAIGLFELKKVNGELTKTLISRHPTPIDFCNKITAYRERYDKLESSIKLDAIKQLTSEQKIEVDNYNNNFTPQNTKQIVCSKLNINPNDLPWDKMISGTHFISEKAQVSNKSEIYFTSTDKGKTKDVMKSDYKWFQDYKPKLSKEVRDALSDIEWRLRRESLEFNKLSKSREQDARQLANWISSMCDVIGIENLVKKNNFFGGSGKREPGWDNFYKPKKENRWWINAIHKALTELSQNKGKRVILLPAMRTSITCPKCKYCDSKNRNGEKFNCLKCGIELNADIDVATENLATVAITAQSMPKPTCERSGDAKKPVRARKAKAPEFHDKLAPSYTVVLREAV

SEQ ID NO: 229 - protein, 793 aa, synthetic construct
  REGION 1..793: note = Casphi-9 polypeptide sequence
MRSSREIGDKILMRQPAEKTAFQVFRQEVIGTQKLSGGDAKTAGRLYKQGKMEAAREWLLKGARDDVPPNFQPPAKCLVVAVSHPFEEWDISKTNHDVQAYIYAQPLQAEGHLNGLSEKWEDTSADQHKLWFEKTGVPDRGLPVQAINKIAKAAVNRAFGVVRKVENRNEKRRSRDNRIAEHNRENGLTEVVREAPEVATNADGFLLHPPGIDPSILSYASVSPVPYNSSKHSFVRLPEEYQAYNVEPDAPIPQFVVEDRFAIPPGQPGYVPEWQRLKCSTNKHRRMRQWSNQDYKPKAGRRAKPLEFQAHLTRERAKGALLVVMRIKEDWVVFDVRGLLRNVEWRKVLSEEAREKLTLKGLLDLFTGDPVIDTKRGIVTFLYKAEITKILSKRTVKTKNARDLLLRLTEPGEDGLRREVGLVAVDLGQTHPIAAAIYRIGRTSAGALESTVLHRQGLREDQKEKLKEYRKRHTALDSRLRKEAFETLSVEQQKEIVTVSGSGAQITKDKVCNYLGVDPSTLPWEKMGSYTHFISDDFLRRGGDPNIVHFDRQPKKGKVSKKSQRIKRSDSQWVGRMRPRLSQETAKARMEADWAAQNENEEYKRLARSKQELARWCVNTLLQNTRCITQCDEIVVVIEDLNVKSLHGKGAREPGWDNFFTPKTENRWFIQILHKTFSELPKHRGEHVIEGCPLRTSITCPACSYCDKNSRNGEKFVCVACGATFHADFEVATYNLVRLATTGMPMPKSLERQGGGEKAGGARKARKKAKQVEKIVVQANANVTMNGASLHSP

SEQ ID NO: 230 - protein, 812 aa, synthetic construct
  REGION 1..812: note = Casphi-10 polypeptide sequence
MDMLDTETNYATETPAQQQDYSPKPPKKAQRAPKGFSKKARPEKKPPKPITLFTQKHFSGVRFLKRVIRDASKILKLSESRTITFLEQAIERDGSAPPDVTPPVHNTIMAVTRPFEEWPEVILSKALQKHCYALTKKIKIKTWPKKGPGKKCLAAWSARTKIPLIPGQVQATNGLFDRIGSIYDGVEKKVTNRNANKKLEYDEAIKEGRNPAVPEYETAYNIDGTLINKPGYNPNLYITQSRTPRLITEADRPLVEKILWQMVEKKTQSRNQARRARLEKAAHLQGLPVPKFVPEKVDRSQKIEIRIIDPLDKIEPYMPQDRMAIKASQDGHVPYWQRPFLSKRRNRRVRAGWGKQVSSIQAWLTGALLVIVRLGNEAFLADIRGALRNAQWRKLLKPDATYQSLFNLFTGDPVVNTRTNHLTMAYREGVVNIVKSRSFKGRQTREHLLTLLGQGKTVAGVSFDLGQKHAAGLLAAHFGLGEDGNPVFTPIQACFLPQRYLDSLTNYRNRYDALTLDMRRQSLLALTPAQQQEFADAQRDPGGQAKRACCLKLNLNPDEIRWDLVSGISTMISDLYIERGGDPRDVHQQVETKPKGKRKSEIRILKIRDGKWAYDFRPKIADETRKAQREQLWKLQKASSEFERLSRYKINIARAIANWALQWGRELSGCDIVIPVLEDLNVGSKFFDGKGKWLLGWDNRFTPKKENRWFIKVLHKAVAELAPHRGVPVYEVMPHRTSMTCPACHYCHPTNREGDRFECQSCHVVKNTDRDVAPYNILRVAVEGKTLDRWQAEKKPQAEPDRPMILIDNQES

SEQ ID NO: 231 - protein, 84 aa, synthetic construct
  REGION 1..84: note = synthetic polypeptide sequence
MTNLSDIIEKETGKQLVIQESILMLPEEVEEVIGNKPESDILVHTAYDESTDENVMLLTSDAPEYKPWALVIQDSNGENKIKML

SEQ ID NO: 232 - protein, 1129 aa, Alicyclobacillus acidoterrestris
  REGION 1..1129: note = MISC_FEATURE - Cas12b/C2c1; sp|T0D7A2|C2C1_ALIAG CRISPR-associated endonuclease C2c1 OS = Alicyclobacillus acido-terrestris (strain ATCC 49025 /DSM 3922/ CIP 106132 / NCIMB 13137/GD3B) GN=c2c1 PE=1 SV=1; Cas12b/C2c1 polypeptide sequence
MAVKSIKVKLRLDDMPEIRAGLWKLHKEVNAGVRYYTEWLSLLRQENLYRRSPNGDGEQECDKTAEECKAELLERLRARQVENGHRGPAGSDDELLQLARQLYELLVPQAIGAKGDAQQIARKFLSPLADKDAVGGLGIAKAGNKPRWVRMREAGEPGWEEEKEKAETRKSADRTADVLRALADFGLKPLMRVYTDSEMSSVEWKPLRKGQAVRTWDRDMFQQAIERMMSWESWNQRVGQEYAKLVEQKNRFEQKNFVGQEHLVHLVNQLQQDMKEASPGLESKEQTAHYVTGRALRGSDKVFEKWGKLAPDAPFDLYDAEIKNVQRRNTRRFGSHDLFAKLAEPEYQALWREDASFLTRYAVYNSILRKLNHAKMFATFTLPDATAHPIWTRFDKLGGNLHQYTFLFNEFGERRHAIRFHKLLKVENGVAREVDDVTVPISMSEQLDNLLPRDPNEPIALYFRDYGAEQHFTGEFGGAKIQCRRDQLAHMHRRRGARDVYLNVSVRVQSQSEARGERRPPYAAVFRLVGDNHRAFVHFDKLSDYLAEHPDDGKLGSEGLLSGLRVMSVDLGLRTSASISVFRVARKDELKPNSKGRVPFFFPIKGNDNLVAVHERSQLLKLPGETESKDLRAIREERQRTLRQLRTQLAYLRLLVRCGSEDVGRRERSWAKLIEQPVDAANHMTPDWREAFENELQKLKSLHGICSDKEWMDAVYESVRRVWRHMGKQVRDWRKDVRSGERPKIRGYAKDVVGGNSIEQIEYLERQYKFLKSWSFFGKVSGQVIRAEKGSRFAITLREHIDHAKEDRLKKLADRIIMEALGYVYALDERGKGKWVAKYPPCQLILLEELSEYQFNNDRPPSENNQLMQWSHRGVFQELINQAQVHDLLVGTMYAAFSSRFDARTGAPGIRCRRVPARCTQEHNPEPFPWWLNKFVVEHTLDACPLRADDLIPTGEGEIFVSPFSAEEGDFHQIHADLNAAQNLQQRLWSDFDISQIRLRCDWGEVDGELVLIPRLTGKRTADSYSNKVFYTNTGVTYYERERGKKRRKVFAQEKLSEEEAELLVEADEAREKSVVLMRDPSGIINRGNWTRQKEFWSMVNQRIEGYLVKQIRSRVPLQDSACENTGDI

SEQ ID NO: 233 - protein, 1368 aa, Mus musculus
  REGION 1..1368: note = MISC_FEATURE - high fidelity Cas9 polypeptide sequence
MDKKYSIGLAIGTNSVGWAVITDEYKVPSKKFKVLGNTDRHSIKKNLIGALLFDSGETAEATRLKRTARRRYTRRKNRICYLQEIFSNEMAKVDDSFFHRLEESFLVEEDKKHERHPIFGNIVDEVAYHEKYPTIYHLRKKLVDSTDKADLRLIYLALAHMIKFRGHFLIEGDLNPDNSDVDKLFIQLVQTYNQLFEENPINASGVDAKAILSARLSKSRRLENLIAQLPGEKKNGLFGNLIALSLGLTPNFKSNFDLAEDAKLQLSKDTYDDDLDNLLAQIGDQYADLFLAAKNLSDAILLSDILRVNTEITKAPLSASMIKRYDEHHQDLTLLKALVRQQLPEKYKEIFFDQSKNGYAGYIDGGASQEEFYKFIKPILEKMDGTEELLVKLNREDLLRKQRTFDNGSIPHQIHLGELHAILRRQEDFYPFLKDNREKIEKILTFRIPYYVGPLARGNSRFAWMTRKSEETITPWNFEEVVDKGASAQSFIERMTAFDKNLPNEKVLPKHSLLYEYFTVYNELTKVKYVTEGMRKPAFLSGEQKKAIVDLLFKTNRKVTVKQLKEDYFKKIECFDSVEISGVEDRFNASLGTYHDLLKIIKDKDFLDNEENEDILEDIVLTLTLFEDREMIEERLKTYAHLFDDKVMKQLKRRRYTGWGALSRKLINGIRDKQSGKTILDFLKSDGFANRNFMALIHDDSLTFKEDIQKAQVSGQGDSLHEHIANLAGSPAIKKGILQTVKVVDELVKVMGRHKPENIVIEMARENQTTQKGQKNSRERMKRIEEGIKELGSQILKEHPVENTQLQNEKLYLYYLQNGRDMYVDQELDINRLSDYDVDHIVPQSFLKDDSIDNKVLTRSDKNRGKSDNVPSEEVVKKMKNYWRQLLNAKLITQRKFDNLTKAERGGLSELDKAGFIKRQLVETRAITKHVAQILDSRMNTKYDENDKLIREVKVITLKSKLVSDFRKDFQFYKVREINNYHHAHDAYLNAVVGTALIKKYPKLESEFVYGDYKVYDVRKMIAKSEQEIGKATAKYFFYSNIMNFFKTEITLANGEIRKRPLIETNGETGEIVWDKGRDFATVRKVLSMPQVNIVKKTEVQTGGFSKESILPKRNSDKLIARKKDWDPKKYGGFDSPTVAYSVLVVAKVEKGKSKKLKSVKELLGITIMERSSFEKNPIDFLEAKGYKEVKKDLIIKLPKYSLFELENGRKRMLASAGELQKGNELALPSKYVNFLYLASHYEKLKGSPEDNEQKQLFVEQHKHYLDEIIEQISEFSKRVILADANLDKVLSAYNKHRDKPIREQAENIIHLFTLTNLGAPAAFKYFDTTIDRKRYTSTKEVLDATLIHQSITGLYETRIDLSQLGGD

SEQ ID NO: 234 - protein, 1368 aa, Streptococcus pyogenes
  REGION 1..1368: note = MISC_FEATURE - PAM-binding SpEQR Cas9 polypeptide sequence
MDKKYSIGLAIGTNSVGWAVITDEYKVPSKKFKVLGNTDRHSIKKNLIGALLFDSGETAEATRLKRTARRRYTRRKNRICYLQEIFSNEMAKVDDSFFHRLEESVLVEEDKKHERHPIFGNIVDEVAYHEKYPTIYHLRKKLVDSTDKADLRLIYLALAHMIKFRGHFLIEGDLNPDNSDVDKLFIQLVQTYNQLFEENPINASGVDAKAILSARLSKSRRLENLIAQLPGEKKNGLFGNLIALSLGLTPNFKSNFDLAEDAKLQLSKDTYDDDLDNLLAQIGDQYADLFLAAKNLSDAILLSDILRVNTEITKAPLSASMIKRYDEHHQDLTLLKALVRQQLPEKYKEIFFDQSKNGYAGYIDGGASQEEFYKFIKPILEKMDGTEELLVKLNREDLLRKQRTFDNGSIPHQIHLGELHAILRRQEDFYPFLKDNREKIEKILTFRIPYYVGPLARGNSRFAWMTRKSEETITPWNFEEVVDKGASAQSFIERMTNFDKNLPNEKVLPKHSLLYEYFTVYNELTKVKYVTEGMRKPAFLSGEQKKAIVDLLFKTNRKVTVKQLKEDYFKKIECFDSVEISGVEDRFNASLGTYHDLLKIIKDKDFLDNEENEDILEDIVLTLTLFEDREMIEERLKTYAHLFDDKVMKQLKRRRYTGWGRLSRKLINGIRDKQSGKTILDFLKSDGFANRNFMQLIHDDSLTFKEDIQKAQVSGQGDSLHEHIANLAGSPAIKKGILQTVKVVDELVKVMGRHKPENIVIEMARENQTTQKGQKNSRERMKRIEEGIKELGSQILKEHPVENTQLQNEKLYLYYLQNGRDMYVDQELDINRLSDYDVDHIVPQSFLKDDSIDNKVLTRSDKNRGKSDNVPSEEVVKKMKNYWRQLLNAKLITQRKFDNLTKAERGGLSELDKAGFIKRQLVETRQITKHVAQILDSRMNTKYDENDKLIREVKVITLKSKLVSDFRKDFQFYKVREINNYHHAHDAYLNAVVGTALIKKYPKLESEFVYGDYKVYDVRKMIAKSEQEIGKATAKYFFYSNIMNFFKTEITLANGEIRKRPLIETNGETGEIVWDKGRDFATVRKVLSMPQVNIVKKTEVQTGGFSKESILPKRNSDKLIARKKDWDPKKYGGFESPTVAYSVLVVAKVEKGKSKKLKSVKELLGITIMERSSFEKNPIDFLEAKGYKEVKKDLIIKLPKYSLFELENGRKRMLASAGELQKGNELALPSKYVNFLYLASHYEKLKGSPEDNEQKQLFVEQHKHYLDEIIEQISEFSKRVILADANLDKVLSAYNKHRDKPIREQAENIIHLFTLTNLGAPAAFKYFDTTIDRKQYRSTKEVLDATLIHQSITGLYETRIDLSQLGGD

SEQ ID NO: 235 - protein, 1368 aa, Streptococcus pyogenes
  REGION 1..1368: note = MISC_FEATURE - PAM-binding SpVQR Cas9 polypeptide sequence
MDKKYSIGLAIGTNSVGWAVITDEYKVPSKKFKVLGNTDRHSIKKNLIGALLFDSGETAEATRLKRTARRRYTRRKNRICYLQEIFSNEMAKVDDSFFHRLEESFLVEEDKKHERHPIFGNIVDEVAYHEKYPTIYHLRKKLVDSTDKADLRLIYLALAHMIKFRGHFLIEGDLNPDNSDVDKLFIQLVQTYNQLFEENPINASGVDAKAILSARLSKSRRLENLIAQLPGEKKNGLFGNLIALSLGLTPNFKSNFDLAEDAKLQLSKDTYDDDLDNLLAQIGDQYADLFLAAKNLSDAILLSDILRVNTEITKAPLSASMIKRYDEHHQDLTLLKALVRQQLPEKYKEIFFDQSKNGYAGYIDGGASQEEFYKFIKPILEKMDGTEELLVKLNREDLLRKQRTFDNGSIPHQIHLGELHAILRRQEDFYPFLKDNREKIEKILTFRIPYYVGPLARGNSRFAWMTRKSEETITPWNFEEVVDKGASAQSFIERMTNFDKNLPNEKVLPKHSLLYEYFTVYNELTKVKYVTEGMRKPAFLSGEQKKAIVDLLFKTNRKVTVKQLKEDYFKKIECFDSVEISGVEDRFNASLGTYHDLLKIIKDKDFLDNEENEDILEDIVLTLTLFEDREMIEERLKTYAHLFDDKVMKQLKRRRYTGWGRLSRKLINGIRDKQSGKTILDFLKSDGFANRNFMQLIHDDSLTFKEDIQKAQVSGQGDSLHEHIANLAGSPAIKKGILQTVKVVDELVKVMGRHKPENIVIEMARENQTTQKGQKNSRERMKRIEEGIKELGSQILKEHPVENTQLQNEKLYLYYLQNGRDMYVDQELDINRLSDYDVDHIVPQSFLKDDSIDNKVLTRSDKNRGKSDNVPSEEVVKKMKNYWRQLLNAKLITQRKFDNLTKAERGGLSELDKAGFIKRQLVETRQITKHVAQILDSRMNTKYDENDKLIREVKVITLKSKLVSDFRKDFQFYKVREINNYHHAHDAYLNAVVGTALIKKYPKLESEFVYGDYKVYDVRKMIAKSEQEIGKATAKYFFYSNIMNFFKTEITLANGEIRKRPLIETNGETGEIVWDKGRDFATVRKVLSMPQVNIVKKTEVQTGGFSKESILPKRNSDKLIARKKDWDPKKYGGFVSPTVAYSVLVVAKVEKGKSKKLKSVKELLGITIMERSSFEKNPIDFLEAKGYKEVKKDLIIKLPKYSLFELENGRKRMLASAGELQKGNELALPSKYVNFLYLASHYEKLKGSPEDNEQKQLFVEQHKHYLDEIIEQISEFSKRVILADANLDKVLSAYNKHRDKPIREQAENIIHLFTLTNLGAPAAFKYFDTTIDRKQYRSTKEVLDATLIHQSITGLYETRIDLSQLGGD

SEQ ID NO: 236 - protein, 1368 aa, Streptococcus pyogenes
  REGION 1..1368: note = MISC_FEATURE - SpVQR Cas9 polypeptide sequence
MDKKYSIGLAIGTNSVGWAVITDEYKVPSKKFKVLGNTDRHSIKKNLIGALLFDSGETAEATRLKRTARRRYTRRKNRICYLQEIFSNEMAKVDDSFFHRLEESFLVEEDKKHERHPIFGNIVDEVAYHEKYPTIYHLRKKLVDSTDKADLRLIYLALAHMIKFRGHFLIEGDLNPDNSDVDKLFIQLVQTYNQLFEENPINASGVDAKAILSARLSKSRRLENLIAQLPGEKKNGLFGNLIALSLGLTPNFKSNFDLAEDAKLQLSKDTYDDDLDNLLAQIGDQYADLFLAAKNLSDAILLSDILRVNTEITKAPLSASMIKRYDEHHQDLTLLKALVRQQLPEKYKEIFFDQSKNGYAGYIDGGASQEEFYKFIKPILEKMDGTEELLVKLNREDLLRKQRTFDNGSIPHQIHLGELHAILRRQEDFYPFLKDNREKIEKILTFRIPYYVGPLARGNSRFAWMTRKSEETITPWNFEEVVDKGASAQSFIERMTNFDKNLPNEKVLPKHSLLYEYFTVYNELTKVKYVTEGMRKPAFLSGEQKKAIVDLLFKTNRKVTVKQLKEDYFKKIECFDSVEISGVEDRFNASLGTYHDLLKIIKDKDFLDNEENEDILEDIVLTLTLFEDREMIEERLKTYAHLFDDKVMKQLKRRRYTGWGRLSRKLINGIRDKQSGKTILDFLKSDGFANRNFMQLIHDDSLTFKEDIQKAQVSGQGDSLHEHIANLAGSPAIKKGILQTVKVVDELVKVMGRHKPENIVIEMARENQTTQKGQKNSRERMKRIEEGIKELGSQILKEHPVENTQLQNEKLYLYYLQNGRDMYVDQELDINRLSDYDVDHIVPQSFLKDDSIDNKVLTRSDKNRGKSDNVPSEEVVKKMKNYWRQLLNAKLITQRKFDNLTKAERGGLSELDKAGFIKRQLVETRQITKHVAQILDSRMNTKYDENDKLIREVKVITLKSKLVSDFRKDFQFYKVREINNYHHAHDAYLNAVVGTALIKKYPKLESEFVYGDYKVYDVRKMIAKSEQEIGKATAKYFFYSNIMNFFKTEITLANGEIRKRPLIETNGETGEIVWDKGRDFATVRKVLSMPQVNIVKKTEVQTGGFSKESILPKRNSDKLIARKKDWDPKKYGGFVSPTVAYSVLVVAKVEKGKSKKLKSVKELLGITIMERSSFEKNPIDFLEAKGYKEVKKDLIIKLPKYSLFELENGRKRMLASARELQKGNELALPSKYVNFLYLASHYEKLKGSPEDNEQKQLFVEQHKHYLDEIIEQISEFSKRVILADANLDKVLSAYNKHRDKPIREQAENIIHLFTLTNLGAPAAFKYFDTTIDRKEYRSTKEVLDATLIHQSITGLYETRIDLSQLGGD

SEQ ID NO: 237 - protein, 1359 aa, Streptococcus macacae
  REGION 1..1359: note = MISC_FEATURE - SpyMacCas9 polypeptide sequence
MDKKYSIGLDIGTNSVGWAVITDDYKVPSKKFKVLGNTDRHSIKKNLIGALLFGSGETAEATRLKRTARRRYTRRKNRICYLQEIFSNEMAKVDDSFFHRLEESFLVEEDKKHERHPIFGNIVDEVAYHEKYPTIYHLRKKLADSTDKADLRLIYLALAHMIKFRGHFLIEGDLNPDNSDVDKLFIQLVQIYNQLFEENPINASRVDAKAILSARLSKSRRLENLIAQLPGEKRNGLFGNLIALSLGLTPNFKSNFDLAEDAKLQLSKDTYDDDLDNLLAQIGDQYADLFLAAKNLSDAILLSDILRVNSEITKAPLSASMIKRYDEHHQDLTLLKALVRQQLPEKYKEIFFDQSKNGYAGYIDGGASQEEFYKFIKPILEKMDGTEELLVKLNREDLLRKQRTFDNGSIPHQIHLGELHAILRRQEDFYPFLKDNREKIEKILTFRIPYYVGPLARGNSRFAWMTRKSEETITPWNFEEVVDKGASAQSFIERMTNFDKNLPNEKVLPKHSLLYEYFTVYNELTKVKYVTEGMRKPAFLSGEQKKAIVDLLFKTNRKVTVKQLKEDYFKKIECFDSVEISGVEDRFNASLGAYHDLLKIIKDKDFLDNEENEDILEDIVLTLTLFEDRGMIEERLKTYAHLFDDKVMKQLKRRRYTGWGRLSRKLINGIRDKQSGKTILDFLKSDGFANRNFMQLIHDDSLTFKEDIQKAQVSGQGHSLHEQIANLAGSPAIKKGILQTVKIVDELVKVMGHKPENIVIEMARENQTTQKGQKNSRERMKRIEEGIKELGSQILKEHPVENTQLQNEKLYLYYLQNGRDMYVDQELDINRLSDYDVDHIVPQSFIKDDSIDNKVLTRSDKNRGKSDNVPSEEVVKKMKNYWRQLLNAKLITQRKFDNLTKAERGGLSELDKAGFIKRQLVETRQITKHVAQILDSRMNTKYDENDKLIREVKVITLKSKLVSDFRKDFQFYKVREINNYHHAHDAYLNAVVGTALIKKYPKLESEFVYGDYKVYDVRKMIAKSEQEIGKATAKYFFYSNIMNFFKTEITLANGEIRKRPLIETNGETGEIVWDKGRDFATVRKVLSMPQVNIVKKTEIQTVGQNGGLFDDNPKSPLEVTPSKLVPLKKELNPKKYGGYQKPTTAYPVLLITDTKQLIPISVMNKKQFEQNPVKFLRDRGYQQVGKNDFIKLPKYTLVDIGDGIKRLWASSKEIHKGNQLVVSKKSQILLYHAHHLDSDLSNDYLQNHNQQFDVLFNEIISFSKKCKLGKEHIQKIENVYSNKKNSASIEELAESFIKLLGFTQLGATSPFNFLGVKLNQKQYKGKKDYILPCTEGTLIRQSITGLYETRVDLSKIGED

SEQ ID NO: 238 - protein, 1410 aa, synthetic construct
  REGION 1..1410: note = CP5 polypeptide sequence
  REGION 1..341: note = MISC_FEATURE - Sequence derived from Cas9
  REGION 342..362: note = MISC_FEATURE - Linker sequence
  REGION 363..1388: note = MISC_FEATURE - Sequence derived from Cas9
  REGION 1389..1410: note = MISC_FEATURE - Bipartite nuclear localization sequence
EIGKATAKYFFYSNIMNFFKTEITLANGEIRKRPLIETNGETGEIVWDKGRDFATVRKVLSMPQVNIVKKTEVQTGGFSKESILPKRNSDKLIARKKDWDPKKYGGFMQPTVAYSVLVVAKVEKGKSKKLKSVKELLGITIMERSSFEKNPIDFLEAKGYKEVKKDLIIKLPKYSLFELENGRKRMLASAKFLQKGNELALPSKYVNFLYLASHYEKLKGSPEDNEQKQLFVEQHKHYLDEIIEQISEFSKRVILADANLDKVLSAYNKHRDKPIREQAENIIHLFTLTNLGAPRAFKYFDTTIARKEYRSTKEVLDATLIHQSITGLYETRIDLSQLGGDGGSGGSGGSGGSGGSGGSGGMDKKYSIGLAIGTNSVGWAVITDEYKVPSKKFKVLGNTDRHSIKKNLIGALLFDSGETAEATRLKRTARRRYTRRKNRICYLQEIFSNEMAKVDDSFFHRLEESFLVEEDKKHERHPIFGNIVDEVAYHEKYPTIYHLRKKLVDSTDKADLRLIYLALAHMIKFRGHFLIEGDLNPDNSDVDKLFIQLVQTYNQLFEENPINASGVDAKAILSARLSKSRRLENLIAQLPGEKKNGLFGNLIALSLGLTPNFKSNFDLAEDAKLQLSKDTYDDDLDNLLAQIGDQYADLFLAAKNLSDAILLSDILRVNTEITKAPLSASMIKRYDEHHQDLTLLKALVRQQLPEKYKEIFFDQSKNGYAGYIDGGASQEEFYKFIKPILEKMDGTEELLVKLNREDLLRKQRTFDNGSIPHQIHLGELHAILRRQEDFYPFLKDNREKIEKILTFRIPYYVGPLARGNSRFAWMTRKSEETITPWNFEEVVDKGASAQSFIERMTNFDKNLPNEKVLPKHSLLYEYFTVYNELTKVKYVTEGMRKPAFLSGEQKKAIVDLLFKTNRKVTVKQLKEDYFKKIECFDSVEISGVEDRFNASLGTYHDLLKIIKDKDFLDNEENEDILEDIVLTLTLFEDREMIEERLKTYAHLFDDKVMKQLKRRRYTGWGRLSRKLINGIRDKQSGKTILDFLKSDGFANRNFMQLIHDDSLTFKEDIQKAQVSGQGDSLHEHIANLAGSPAIKKGILQTVKVVDELVKVMGRHKPENIVIEMARENQTTQKGQKNSRERMKRIEEGIKELGSQILKEHPVENTQLQNEKLYLYYLQNGRDMYVDQELDINRLSDYDVDHIVPQSFLKDDSIDNKVLTRSDKNRGKSDNVPSEEVVKKMKNYWRQLLNAKLITQRKFDNLTKAERGGLSELDKAGFIKRQLVETRQITKHVAQILDSRMNTKYDENDKLIREVKVITLKSKLVSDFRKDFQFYKVREINNYHHAHDAYLNAVVGTALIKKYPKLESEFVYGDYKVYDVRKMIAKSEQEGADKRTADGSEFESPKKKRKV

SEQ ID NO: 239 - protein, 1302 aa, synthetic construct
  REGION 1..1302: note = Cas12c1 polypeptide sequence
MQTKKTHLHLISAKASRKYRRTIACLSDTAKKDLERRKQSGAADPAQELSCLKTIKFKLEVPEGSKLPSFDRISQIYNALETIEKGSLSYLLFALILSGFRIFPNSSAAKTFASSSCYKNDQFASQIKEIFGEMVKNFIPSELESILKKGRRKNNKDWTEENIKRVLNSEFGRKNSEGSSALFDSFLSKFSQELFRKFDSWNEVNKKYLEAAELLDSMLASYGPFDSVCKMIGDSDSRNSLPDKSTIAFTNNAEITVDIESSVMPYMAIAALLREYRQSKSKAAPVAYVQSHLTTTNGNGLSWFFKFGLDLIRKAPVSSKQSTSDGSKSLQELFSVPDDKLDGLKFIKEACEALPEASLLCGEKGELLGYQDFRTSFAGHIDSWVANYVNRLFELIELVNQLPESIKLPSILTQKNHNLVASLGLQEAEVSHSLELFEGLVKNVRQTLKKLAGIDISSSPNEQDIKEFYAFSDVLNRLGSIRNQIENAVQTAKKDKIDLESAIEWKEWKKLKKLPKLNGLGGGVPKQQELLDKALESVKQIRHYQRIDFERVIQWAVNEHCLETVPKFLVDAEKKKINKESSTDFAAKENAVRFLLEGIGAAARGKTDSVSKAAYNWFVVNNFLAKKDLNRYFINCQGCIYKPPYSKRRSLAFALRSDNKDTIEVVWEKFETFYKEISKEIEKFNIFSQEFQTFLHLENLRMKLLLRRIQKPIPAEIAFFSLPQEYYDSLPPNVAFLALNQEITPSEYITQFNLYSSFLNGNLILLRRSRSYLRAKFSWVGNSKLIYAAKEARLWKIPNAYWKSDEWKMILDSNVLVFDKAGNVLPAPTLKKVCEREGDLRLFYPLLRQLPHDWCYRNPFVKSVGREKNVIEVNKEGEPKVASALPGSLFRLIGPAPFKSLLDDCFFNPLDKDLRECMLIVDQEISQKVEAQKVEASLESCTYSIAVPIRYHLEEPKVSNQFENVLAIDQGEAGLAYAVFSLKSIGEAETKPIAVGTIRIPSIRRLIHSVSTYRKKKQRLQNFKQNYDSTAFIMRENVTGDVCAKIVGLMKEFNAFPVLEYDVKNLESGSRQLSAVYKAVNSHFLYFKEPGRDALRKQLWYGGDSWTIDGIEIVTRERKEDGKEGVEKIVPLKVFPGRSVSARFTSKTCSCCGRNVFDWLFTEKKAKTNKKFNVNSKGELTTADGVIQLFEADRSKGPKFYARRKERTPLTKPIAKGSYSLEEIERRVRTNLRRAPKSKQSRDTSQSQYFCVYKDCALHFSGMQADENAAINIGRRFLTALRKNRRSDFPSNVKISDRLLDN

SEQ ID NO: 240 - protein, 1218 aa, synthetic construct
  REGION 1..1218: note = Cas12c2 polypeptide sequence
MTKHSIPLHAFRNSGADARKWKGRIALLAKRGKETMRTLQFPLEMSEPEAAAINTTPFAVAYNAIEGTGKGTLFDYWAKLHLAGFRFFPSGGAATIFRQQAVFEDASWNAAFCQQSGKDWPWLVPSKLYERFTKAPREVAKKDGSKKSIEFTQENVANESHVSLVGASITDKTPEDQKEFFLKMAGALAEKFDSWKSANEDRIVAMKVIDEFLKSEGLHLPSLENIAVKCSVETKPDNATVAWHDAPMSGVQNLAIGVFATCASRIDNIYDLNGGKLSKLIQESATTPNVTALSWLFGKGLEYFRTTDIDTIMQDFNIPASAKESIKPLVESAQAIPTMTVLGKKNYAPFRPNFGGKIDSWIANYASRLMLLNDILEQIEPGFELPQALLDNETLMSGIDMTGDELKELIEAVYAWVDAAKQGLATLLGRGGNVDDAVQTFEQFSAMMDTLNGTLNTISARYVRAVEMAGKDEARLEKLIECKFDIPKWCKSVPKLVGISGGLPKVEEEIKVMNAAFKDVRARMFVRFEEIAAYVASKGAGMDVYDALEKRELEQIKKLKSAVPERAHIQAYRAVLHRIGRAVQNCSEKTKQLFSSKVIEMGVFKNPSHLNNFIFNQKGAIYRSPFDRSRHAPYQLHADKLLKNDWLELLAEISATLMASESTEQMEDALRLERTRLQLQLSGLPDWEYPASLAKPDIEVEIQTALKMQLAKDTVTSDVLQRAFNLYSSVLSGLTFKLLRRSFSLKMRFSVADTTQLIYVPKVCDWAIPKQYLQAEGEIGIAARVVTESSPAKMVTEVEMKEPKALGHFMQQAPHDWYFDASLGGTQVAGRIVEKGKEVGKERKLVGYRMRGNSAYKTVLDKSLVGNTELSQCSMIIEIPYTQTVDADFRAQVQAGLPKVSINLPVKETITASNKDEQMLFDRFVAIDLGERGLGYAVFDAKTLELQESGHRPIKAITNLLNRTHHYEQRPNQRQKFQAKFNVNLSELRENTVGDVCHQINRICAYYNAFPVLEYMVPDRLDKQLKSVYESVTNRYIWSSTDAHKSARVQFWLGGETWEHPYLKSAKDKKPLVLSPGRGASGKGTSQTCSCCGRNPFDLIKDMKPRAKIAVVDGKAKLENSELKLFERNLESKDDMLARRHRNERAGMEQPLTPGNYTVDEIKALLRANLRRAPKNRRTKDTTVSEYHCVFSDCGKTMHADENAAVNIGGKFIADIEK

SEQ ID NO: 241 - protein, 1252 aa, Oleiphilus sp.
  REGION 1..1252: note = MISC_FEATURE - OspCas12c polypeptide sequence
MTKLRHRQKKLTHDWAGSKKREVLGSNGKLQNPLLMPVKKGQVTEFRKAFSAYARATKGEMTDGRKNMFTHSFEPFKTKPSLHQCELADKAYQSLHSYLPGSLAHFLLSAHALGFRIFSKSGEATAFQASSKIEAYESKLASELACVDLSIQNLTISTLFNALTTSVRGKGEETSADPLIARFYTLLTGKPLSRDTQGPERDLAEVISRKIASSFGTWKEMTANPLQSLQFFEEELHALDANVSLSPAFDVLIKMNDLQGDLKNRTIVFDPDAPVFEYNAEDPADIIIKLTARYAKEAVIKNQNVGNYVKNAITTTNANGLGWLLNKGLSLLPVSTDDELLEFIGVERSHPSCHALIELIAQLEAPELFEKNVFSDTRSEVQGMIDSAVSNHIARLSSSRNSLSMDSEELERLIKSFQIHTPHCSLFIGAQSLSQQLESLPEALQSGVNSADILLGSTQYMLTNSLVEESIATYQRTLNRINYLSGVAGQINGAIKRKAIDGEKIHLPAAWSELISLPFIGQPVIDVESDLAHLKNQYQTLSNEFDTLISALQKNFDLNFNKALLNRTQHFEAMCRSTKKNALSKPEIVSYRDLLARLTSCLYRGSLVLRRAGIEVLKKHKIFESNSELREHVHERKHFVFVSPLDRKAKKLLRLTDSRPDLLHVIDEILQHDNLENKDRESLWLVRSGYLLAGLPDQLSSSFINLPIITQKGDRRLIDLIQYDQINRDAFVMLVTSAFKSNLSGLQYRANKQSFVVTRTLSPYLGSKLVYVPKDKDWLVPSQMFEGRFADILQSDYMVWKDAGRLCVIDTAKHLSNIKKSVFSSEEVLAFLRELPHRTFIQTEVRGLGVNVDGIAFNNGDIPSLKTFSNCVQVKVSRTNTSLVQTLNRWFEGGKVSPPSIQFERAYYKKDDQIHEDAAKRKIRFQMPATELVHASDDAGWTPSYLLGIDPGEYGMGLSLVSINNGEVLDSGFIHINSLINFASKKSNHQTKVVPRQQYKSPYANYLEQSKDSAAGDIAHILDRLIYKLNALPVFEALSGNSQSAADQVWTKVLSFYTWGDNDAQNSIRKQHWFGASHWDIKGMLRQPPTEKKPKPYIAFPGSQVSSYGNSQRCSCCGRNPIEQLREMAKDTSIKELKIRNSEIQLFDGTIKLFNPDPSTVIERRRHNLGPSRIPVADRTFKNISPSSLEFKELITIVSRSIRHSPEFIAKKRGIGSEYFCAYSDCNSSLNSEANAAANVAQKFQKQLFFEL

SEQ ID NO: 242 - protein, 767 aa, synthetic construct
  REGION 1..767: note = Cas12g1 polypeptide sequence
MAQASSTPAVSPRPRPRYREERTLVRKLLPRPGQSKQEFRENVKKLRKAFLQFNADVSGVCQWAIQFRPRYGKPAEPTETFWKFFLEPETSLPPNDSRSPEFRRLQAFEAAAGINGAAALDDPAFTNELRDSILAVASRPKTKEAQRLFSRLKDYQPAHRMILAKVAAEWIESRYRRAHQNWERNYEEWKKEKQEWEQNHPELTPEIREAFNQIFQQLEVKEKRVRICPAARLLQNKDNCQYAGKNKHSVLCNQFNEFKKNHLQGKAIKFFYKDAEKYLRCGLQSLKPNVQGPFREDWNKYLRYMNLKEETLRGKNGGRLPHCKNLGQECEFNPHTALCKQYQQQLSSRPDLVQHDELYRKWRREYWREPRKPVFRYPSVKRHSIAKIFGENYFQADFKNSVVGLRLDSMPAGQYLEFAFAPWPRNYRPQPGETEISSVHLHFVGTRPRIGFRFRVPHKRSRFDCTQEELDELRSRTFPRKAQDQKFLEAARKRLLETFPGNAEQELRLLAVDLGTDSARAAFFIGKTFQQAFPLKIVKIEKLYEQWPNQKQAGDRRDASSKQPRPGLSRDHVGRHLQKMRAQASEIAQKRQELTGTPAPETTTDQAAKKATLQPFDLRGLTVHTARMIRDWARLNARQIIQLAEENQVDLIVLESLRGFRPPGYENLDQEKKRRVAFFAHGRIRRKVTEKAVERGMRVVTVPYLASSKVCAECRKKQKDNKQWEKNKKRGLFKCEGCGSQAQVDENAARVLGRVFWGEIELPTAIP

SEQ ID NO: 243 - protein, 870 aa, synthetic construct
  REGION 1..870: note = Cas12h1 polypeptide sequence
MKVHEIPRSQLLKIKQYEGSFVEWYRDLQEDRKKFASLLFRWAAFGYAAREDDGATYISPSQALLERRLLLGDAEDVAIKFLDVLFKGGAPSSSCYSLFYEDFALRDKAKYSGAKREFIEGLATMPLDKIIERIRQDEQLSKIPAEEWLILGAEYSPEEIWEQVAPRIVNVDRSLGKQLRERLGIKCRRPHDAGYCKILMEVVARQLRSHNETYHEYLNQTHEMKTKVANNLTNEFDLVCEFAEVLEEKNYGLGWYVLWQGVKQALKEQKKPTKIQIAVDQLRQPKFAGLLTAKWRALKGAYDTWKLKKRLEKRKAFPYMPNWDNDYQIPVGLTGLGVFTLEVKRTEVVVDLKEHGKLFCSHSHYFGDLTAEKHPSRYHLKFRHKLKLRKRDSRVEPTIGPWIEAALREITIQKKPNGVFYLGLPYALSHGIDNFQIAKRFFSAAKPDKEVINGLPSEMVVGAADLNLSNIVAPVKARIGKGLEGPLHALDYGYGELIDGPKILTPDGPRCGELISLKRDIVEIKSAIKEFKACQREGLTMSEETTTWLSEVESPSDSPRCMIQSRIADTSRRLNSFKYQMNKEGYQDLAEALRLLDAMDSYNSLLESYQRMHLSPGEQSPKEAKFDTKRASFRDLLRRRVAHTIVEYFDDCDIVFFEDLDGPSDSDSRNNALVKLLSPRTLLLYIRQALEKRGIGMVEVAKDGTSQNNPISGHVGWRNKQNKSEIYFYEDKELLVMDADEVGAMNILCRGLNHSVCPYSFVTKAPEKKNDEKKEGDYGKRVKRFLKDRYGSSNVRFLVASMGFVTVTTKRPKDALVGKRLYYHGGELVTHDLHNRMKDEIKYLVEKEVLARRVSLSDSTIKSYKSFAHV

SEQ ID NO: 244 - protein, 1093 aa, synthetic construct
  REGION 1..1093: note = Cas12i1 polypeptide sequence
MSNKEKNASETRKAYTTKMIPRSHDRMKLLGNFMDYLMDGTPIFFELWNQFGGGIDRDIISGTANKDKISDDLLLAVNWFKVMPINSKPQGVSPSNLANLFQQYSGSEPDIQAQEYFASNFDTEKHQWKDMRVEYERLLAELQLSRSDMHHDLKLMYKEKCIGLSLSTAHYITSVMFGTGAKNNRQTKHQFYSKVIQLLEESTQINSVEQLASIILKAGDCDSYRKLRIRCSRKGATPSILKIVQDYELGTNHDDEVNVPSLIANLKEKLGRFEYECEWKCMEKIKAFLASKVGPYYLGSYSAMLENALSPIKGMTTKNCKFVLKQIDAKNDIKYENEPFGKIVEGFFDSPYFESDTNVKWVLHPHHIGESNIKTLWEDLNAIHSKYEEDIASLSEDKKEKRIKVYQGDVCQTINTYCEEVGKEAKTPLVQLLRYLYSRKDDIAVDKIIDGITFLSKKHKVEKQKINPVIQKYPSFNFGNNSKLLGKIISPKDKLKHNLKCNRNQVDNYIWIEIKVLNTKTMRWEKHHYALSSTRFLEEVYYPATSENPPDALAARFRTKTNGYEGKPALSAEQIEQIRSAPVGLRKVKKRQMRLEAARQQNLLPRYTWGKDFNINICKRGNNFEVTLATKVKKKKEKNYKVVLGYDANIVRKNTYAAIEAHANGDGVIDYNDLPVKPIESGFVTVESQVRDKSYDQLSYNGVKLLYCKPHVESRRSFLEKYRNGTMKDNRGNNIQIDFMKDFEAIADDETSLYYFNMKYCKLLQSSIRNHSSQAKEYREEIFELLRDGKLSVLKLSSLSNLSFVMFKVAKSLIGTYFGHLLKKPKNSKSDVKAPPITDEDKQKADPEMFALRLALEEKRLNKVKSKKEVIANKIVAKALELRDKYGPVLIKGENISDTTKKGKKSSTNSFLMDWLARGVANKVKEMVMMHQGLEFVEVNPNFTSHQDPFVHKNPENTFRARYSRCTPSELTEKNRKEILSFLSDKPSKRPTNAYYNEGAMAFLATYGLKKNDVLGVSLEKFKQIMANILHQRSEDQLLFPSRGGMFYLATYKLDADATSVNWNGKQFWVCNADLVAAYNVGLVDIQKDFKKK

SEQ ID NO: 245 - protein, 1054 aa, synthetic construct
  REGION 1..1054: note = Cas12i2 polypeptide sequence
MSSAIKSYKSVLRPNERKNQLLKSTIQCLEDGSAFFFKMLQGLFGGITPEIVRFSTEQEKQQQDIALWCAVNWFRPVSQDSLTHTIASDNLVEKFEEYYGGTASDAIKQYFSASIGESYYWNDCRQQYYDLCRELGVEVSDLTHDLEILCREKCLAVATESNQNNSIISVLFGTGEKEDRSVKLRITKKILEAISNLKEIPKNVAPIQEIILNVAKATKETFRQVYAGNLGAPSTLEKFIAKDGQKEFDLKKLQTDLKKVIRGKSKERDWCCQEELRSYVEQNTIQYDLWAWGEMFNKAHTALKIKSTRNYNFAKQRLEQFKEIQSLNNLLVVKKLNDFFDSEFFSGEETYTICVHHLGGKDLSKLYKAWEDDPADPENAIVVLCDDLKNNFKKEPIRNILRYIFTIRQECSAQDILAAAKYNQQLDRYKSQKANPSVLGNQGFTWTNAVILPEKAQRNDRPNSLDLRIWLYLKLRHPDGRWKKHHIPFYDTRFFQEIYAAGNSPVDTCQFRTPRFGYHLPKLTDQTAIRVNKKHVKAAKTEARIRLAIQQGTLPVSNLKITEISATINSKGQVRIPVKFDVGRQKGTLQIGDRFCGYDQNQTASHAYSLWEVVKEGQYHKELGCFVRFISSGDIVSITENRGNQFDQLSYEGLAYPQYADWRKKASKFVSLWQITKKNKKKEIVTVEAKEKFDAICKYQPRLYKFNKEYAYLLRDIVRGKSLVELQQIRQEIFRFIEQDCGVTRLGSLSLSTLETVKAVKGIIYSYFSTALNASKNNPISDEQRKEFDPELFALLEKLELIRTRKKKQKVERIANSLIQTCLENNIKFIRGEGDLSTTNNATKKKANSRSMDWLARGVFNKIRQLAPMHNITLFGCGSLYTSHQDPLVHRNPDKAMKCRWAAIPVKDIGDWVLRKLSQNLRAKNIGTGEYYHQGVKEFLSHYELQDLEEELLKWRSDRKSNIPCWVLQNRLAEKLGNKEAVVYIPVRGGRIYFATHKVATGAVSIVFDQKQVWVCNADHVAAANIALTVKGIGEQSSDEENPDGSRIKLQLTS

SEQ ID NO: 246 - protein, 4 aa, synthetic construct
  REGION 1..4: note = synthetic peptide sequence
GGGS

SEQ ID NO: 247 - protein, 5 aa, synthetic construct
  REGION 1..5: note = synthetic peptide sequence
GGGGS

SEQ ID NO: 248 - protein, 5 aa, synthetic construct
  REGION 1..5: note = synthetic peptide sequence
EAAAK

SEQ ID NO: 249 - protein, 16 aa, synthetic construct
  REGION 1..16: note = synthetic peptide sequence
SGSETPGTSESATPES

SEQ ID NO: 250 - protein, 6 aa, synthetic construct
  REGION 1..6: note = linker peptide sequence
GGSGGS

SEQ ID NO: 251 - protein, 20 aa, synthetic construct
  REGION 1..20: note = synthetic peptide sequence
GSSGSETPGTSESATPESSG

SEQ ID NO: 252 - DNA, 18 bp, synthetic construct
  misc_feature 1..18: note = synthetic oligonucleotide sequence
  source 1..18: mol_type = other DNA
ggaggctctggaggaagc

SEQ ID NO: 253 - DNA, 60 bp, synthetic construct
  misc_feature 1..60: note = synthetic oligonucleotide sequence
  source 1..60: mol_type = other DNA
ggctcttctggatctgaaacacctggcacaagcgagagcgccacccctgagagctctggc

SEQ ID NO: 254 - protein, 1129 aa, Alicyclobacillus acidiphilus
  REGION 1..1129: note = MISC_FEATURE - AacCas12b polypeptide sequence
MAVKSMKVKLRLDNMPEIRAGLWKLHTEVNAGVRYYTEWLSLLRQENLYRRSPNGDGEQECYKTAEECKAELLERLRARQVENGHCGPAGSDDELLQLARQLYELLVPQAIGAKGDAQQIARKFLSPLADKDAVGGLGIAKAGNKPRWVRMREAGEPGWEEEKAKAEARKSTDRTADVLRALADFGLKPLMRVYTDSDMSSVQWKPLRKGQAVRTWDRDMFQQAIERMMSWESWNQRVGEAYAKLVEQKSRFEQKNFVGQEHLVQLVNQLQQDMKEASHGLESKEQTAHYLTGRALRGSDKVFEKWEKLDPDAPFDLYDTEIKNVQRRNTRRFGSHDLFAKLAEPKYQALWREDASFLTRYAVYNSIVRKLNHAKMFATFTLPDATAHPIWTRFDKLGGNLHQYTFLFNEFGEGRHAIRFQKLLTVEDGVAKEVDDVTVPISMSAQLDDLLPRDPHELVALYFQDYGAEQHLAGEFGGAKIQYRRDQLNHLHARRGARDVYLNLSVRVQSQSEARGERRPPYAAVFRLVGDNHRAFVHFDKLSDYLAEHPDDGKLGSEGLLSGLRVMSVDLGLRTSASISVFRVARKDELKPNSEGRVPFCFPIEGNENLVAVHERSQLLKLPGETESKDLRAIREERQRTLRQLRTQLAYLRLLVRCGSEDVGRRERSWAKLIEQPMDANQMTPDWREAFEDELQKLKSLYGICGDREWTEAVYESVRRVWRHMGKQVRDWRKDVRSGERPKIRGYQKDVVGGNSIEQIEYLERQYKFLKSWSFFGKVSGQVIRAEKGSRFAITLREHIDHAKEDRLKKLADRIIMEALGYVYALDDERGKGKWVAKYPPCQLILLEELSEYQFNNDRPPSENNQLMQWSHRGVFQELLNQAQVHDLLVGTMYAAFSSRFDARTGAPGIRCRRVPARCAREQNPEPFPWWLNKFVAEHKLDGCPLRADDLIPTGEGEFFVSPFSAEEGDFHQIHADLNAAQNLQRRLWSDFDISQIRLRCDWGEVDGEPVLIPRTTGKRTADSYGNKVFYTKTGVTYYERERGKKRRKVFAQEELSEEEAELLVEADEAREKSVVLMRDPSGIINRGDWTRQKEFWSMVNQRIEGYLVKQIRSRVRLQESACENTGDI

SEQ ID NO: 255 - protein, 1140 aa, Bacillus hisashii
  REGION 1..1140: note = MISC_FEATURE - BhCas12b polypeptide sequence
MAPKKKRKVGIHGVPAAATRSFILKIEPNEEVKKGLWKTHEVLNHGIAYYMNILKLIRQEAIYEHHEQDPKNPKKVSKAEIQAELWDFVLKMQKCNSFTHEVDKDEVFNILRELYEELVPSSVEKKGEANQLSNKFLYPLVDPNSQSGKGTASSGRKPRWYNLKIAGDPSWEEEKKKWEEDKKKDPLAKILGKLAEYGLIPLFIPYTDSNEPIVKEIKWMEKSRNQSVRRLDKDMFIQALERFLSWESWNLKVKEEYEKVEKEYKTLEERIKEDIQALKALEQYEKERQEQLLRDTLNTNEYRLSKRGLRGWREIIQKWLKMDENEPSEKYLEVFKDYQRKHPREAGDYSVYEFLSKKENHFIWRNHPEYPYLYATFCEIDKKKKDAKQQATFTLADPINHPLWVRFEERSGSNLNKYRILTEQLHTEKLKKKLTVQLDRLIYPTESGGWEEKGKVDIVLLPSRQFYNQIFLDIEEKGKHAFTYKDESIKFPLKGTLGGARVQFDRDHLRRYPHKVESGNVGRIYFNMTVNIEPTESPVSKSLKIHRDDFPKVVNFKPKELTEWIKDSKGKKLKSGIESLEIGLRVMSIDLGQRQAAAASIFEVVDQKPDIEGKLFFPIKGTELYAVHRASFNIKLPGETLVKSREVLRKAREDNLKLMNQKLNFLRNVLHFQQFEDITEREKRVTKWISRQENSDVPLVYQDELIQIRELMYKPYKDWVAFLKQLHKRLEVEIGKEVKHWRKSLSDGRKGLYGISLKNIDEIDRTRKFLLRWSLRPTEPGEVRRLEPGQRFAIDQLNHLNALKEDRLKKMANTIIMHALGYCYDVRKKKWQAKNPACQIILFEDLSNYNPYEERSRFENSKLMKWSRREIPRQVALQGEIYGLQVGEVGAQFSSRFHAKTGSPGIRCSVVTKEKLQDNRFFKNLQREGRLTLDKIAVLKEGDLYPDKGGEKFISLSKDRKCVTTHADINAAQNLQKRFWTRTHGFYKVYCKAYQVDGQTVYIPESKDQKQKIIEEFGEGYFILKDGVYEWVNAGKLKIKKGSSKQSSSELVDSDILKDSFDLASELKGEKLMLYRDPSGNVFPSDKWMAAGVFFGKLERILISKLTNQYSISTIEDDSSKQSMKRPAATKKAGQAKKKK

SEQ ID NO: 256 - protein, 1108 aa, Bacillus thermoamylovorans
  REGION 1..1108: note = MISC_FEATURE - BTCas12b polypeptide sequence
MATRSFILKIEPNEEVKKGLWKTHEVLNHGIAYYMNILKLIRQEAIYEHHEQDPKNPKKVSKAEIQAELWDFVLKMQKCNSFTHEVDKDVVFNILRELYEELVPSSVEKKGEANQLSNKFLYPLVDPNSQSGKGTASSGRKPRWYNLKIAGDPSWEEEKKKWEEDKKKDPLAKILGKLAEYGLIPLFIPFTDSNEPIVKEIKWMEKSRNQSVRRLDKDMFIQALERFLSWESWNLKVKEEYEKVEKEHKTLEERIKEDIQAFKSLEQYEKERQEQLLRDTLNTNEYRLSKRGLRGWREIIQKWLKMDENEPSEKYLEVFKDYQRKHPREAGDYSVYEFLSKKENHFIWRNHPEYPYLYATFCEIDKKKKDAKQQATFTLADPINHPLWVRFEERSGSNLNKYRILTEQLHTEKLKKKLTVQLDRLIYPTESGGWEEKGKVDIVLLPSRQFYNQIFLDIEEKGKHAFTYKDESIKFPLKGTLGGARVQFDRDHLRRYPHKVESGNVGRIYFNMTVNIEPTESPVSKSLKIHRDDFPKFVNFKPKELTEWIKDSKGKKLKSGIESLEIGLRVMSIDLGQRQAAAASIFEVVDQKPDIEGKLFFPIKGTELYAVHRASFNIKLPGETLVKSREVLRKAREDNLKLMNQKLNFLRNVLHFQQFEDITEREKRVTKWISRQENSDVPLVYQDELIQIRELMYKPYKDWVAFLKQLHKRLEVEIGKEVKHWRKSLSDGRKGLYGISLKNIDEIDRTRKFLLRWSLRPTEPGEVRRLEPGQRFAIDQLNHLNALKEDRLKKMANTIIMHALGYCYDVRKKKWQAKNPACQIILFEDLSNYNPYEERSRFENSKLMKWSRREIPRQVALQGEIYGLQVGEVGAQFSSRFHAKTGSPGIRCSVVTKEKLQDNRFFKNLQREGRLTLDKIAVLKEGDLYPDKGGEKFISLSKDRKLVTTHADINAAQNLQKRFWTRTHGFYKVYCKAYQVDGQTVYIPESKDQKQKIIEEFGEGYFILKDGVYEWGNAGKLKIKKGSSKQSSSELVDSDILKDSFDLASELKGEKLMLYRDPSGNVFPSDKWMAAGVFFGKLERILISKLTNQYSISTIEDDSSKQSM

SEQ ID NO: 257 - protein, 1112 aa, Bacillus sp.
  REGION 1..1112: note = MISC_FEATURE - BvCas12b (Bacillus sp. V3-13) polypeptide sequence
MAIRSIKLKMKTNSGTDSIYLRKALWRTHQLINEGIAYYMNLLTLYRQEAIGDKTKEAYQAELINIIRNQQRNNGSSEEHGSDQEILALLRQLYELIIPSSIGESGDANQLGNKFLYPLVDPNSQSGKGTSNAGRKPRWKRLKEEGNPDWELEKKKDEERKAKDPTVKIFDNLNKYGLLPLFPLFTNIQKDIEWLPLGKRQSVRKWDKDMFIQAIERLLSWESWNRRVADEYKQLKEKTESYYKEHLTGGEEWIEKIRKFEKERNMELEKNAFAPNDGYFITSRQIRGWDRVYEKWSKLPESASPEELWKVVAEQQNKMSEGFGDPKVFSFLANRENRDIWRGHSERIYHIAAYNGLQKKLSRTKEQATFTLPDAIEHPLWIRYESPGGTNLNLFKLEEKQKKNYYVTLSKIIWPSEEKWIEKENIEIPLAPSIQFNRQIKLKQHVKGKQEISFSDYSSRISLDGVLGGSRIQFNRKYIKNHKELLGEGDIGPVFFNLVVDVAPLQETRNGRLQSPIGKALKVISSDFSKVIDYKPKELMDWMNTGSASNSFGVASLLEGMRVMSIDMGQRTSASVSIFEVVKELPKDQEQKLFYSINDTELFAIHKRSFLLNLPGEVVTKNNKQQRQERRKKRQFVRSQIRMLANVLRLETKKTPDERKKAIHKLMEIVQSYDSWTASQKEVWEKELNLLTNMAAFNDEIWKESLVELHHRIEPYVGQIVSKWRKGLSEGRKNLAGISMWNIDELEDTRRLLISWSKRSRTPGEANRIETDEPFGSSLLQHIQNVKDDRLKQMANLIIMTALGFKYDKEEKDRYKRWKETYPACQIILFENLNRYLFNLDRSRRENSRLMKWAHRSIPRTVSMQGEMFGLQVGDVRSEYSSRFHAKTGAPGIRCHALTEEDLKAGSNTLKRLIEDGFINESELAYLKKGDIIPSQGGELFVTLSKRYKKDSDNNELTVIHADINAAQNLQKRFWQQNSEVYRVPCQLARMGEDKLYIPKSQTETIKKYFGKGSFVKNNTEQEVYKWEKSEKMKIKTDTTFDLQDLDGFEDISKTIELAQEQQKKYLTMFRDPSGYFFNNETWRPQKEYWSIVNNIIKSCLKKKILSNKVEL

SEQ ID NO: 258 - DNA, 47 bp, synthetic construct
  misc_feature 1..47: note = 5'UTR oligonucleotide sequence
  source 1..47: mol_type = other DNA
gggaaataagagagaaaagaagagtaagaagaaatataagagccacc

SEQ ID NO: 259 - DNA, 101 bp, synthetic construct
  misc_feature 1..101: note = 3'UTR (TriLink standard UTR)polynucleotide sequence
  source 1..101: mol_type = other DNA
gctggagcctcggtggccatgcttcttgccccttgggcctccccccagcccctcctccccttcctgcacccgtacccccgtggtctttgaataaagtctga

SEQ ID NO: 260 - DNA, 3420 bp, Bacillus hisashii
  misc_feature 1..3420: note = bhCas12b (V4) polynucleotide sequence
  source 1..3420: mol_type = genomic DNA
atggccccaaagaagaagcggaaggtcggtatccacggagtcccagcagccgccaccagatccttcatcctgaagatcgagcccaacgaggaagtgaagaaaggcctctggaaaacccacgaggtgctgaaccacggaatcgcctactacatgaatatcctgaagctgatccggcaagaggccatctacgagcaccacgagcaggaccccaagaatcccaagaaggtgtccaaggccgagatccaggccgagctgtgggatttcgtgctgaagatgcagaagtgcaacagcttcacacacgaggtggacaaggacgaggtgttcaacatcctgagagagctgtacgaggaactggtgcccagcagcgtggaaaagaagggcgaagccaaccagctgagcaacaagtttctgtaccctctggtggaccccaacagccagtctggaaagggaacagccagcagcggcagaaagcccagatggtacaacctgaagattgccggcgatccctcctgggaagaagagaagaagaagtgggaagaagataagaaaaaggacccgctggccaagatcctgggcaagctggctgagtacggactgatccctctgttcatcccctacaccgacagcaacgagcccatcgtgaaagaaatcaagtggatggaaaagtcccggaaccagagcgtgcggcggctggataaggacatgttcattcaggccctggaacggttcctgagctgggagagctggaacctgaaagtgaaagaggaatacgagaaggtcgagaaagagtacaagaccctggaagagaggatcaaagaggacatccaggctctgaaggctctggaacagtatgagaaagagcggcaagaacagctgctgcgggacaccctgaacaccaacgagtaccggctgagcaagagaggccttagaggctggcgggaaatcatccagaaatggctgaaaatggacgagaacgagccctccgagaagtacctggaagtgttcaaggactaccagcggaagcaccctagagaggccggcgattacagcgtgtacgagttcctgtccaagaaagagaaccacttcatctggcggaatcaccctgagtacccctacctgtacgccaccttctgcgagatcgacaagaaaaagaaggacgccaagcagcaggccaccttcacactggccgatcctatcaatcaccctctgtgggtccgattcgaggaaagaagcggcagcaacctgaacaagtacagaatcctgaccgagcagctgcacaccgagaagctgaagaaaaagctgacagtgcagctggaccggctgatctaccctacagaatctggcggctgggaagagaagggcaaagtggacattgtgctgctgcccagccggcagttctacaaccagatcttcctggacatcgaggaaaagggcaagcacgccttcacctacaaggatgagagcatcaagttccctctgaagggcacactcggcggagccagagtgcagttcgacagagatcacctgagaagataccctcacaaggtggaaagcggcaacgtgggcagaatctacttcaacatgaccgtgaacatcgagcctacagagtccccagtgtccaagtctctgaagatccaccgggacgacttccccaaggtggtcaacttcaagcccaaagaactgaccgagtggatcaaggacagcaagggcaagaaactgaagtccggcatcgagtccctggaaatcggcctgagagtgatgagcatcgacctgggacagagacaggccgctgccgcctctattttcgaggtggtggatcagaagcccgacatcgaaggcaagctgtttttcccaatcaagggcaccgagctgtatgccgtgcacagagccagcttcaacatcaagctgcccggcgagacactggtcaagagcagagaagtgctgcggaaggccagagaggacaatctgaaactgatgaaccagaagctcaacttcctgcggaacgtgctgcacttccagcagttcgaggacatcaccgagagagagaagcgggtcaccaagtggatcagcagacaagagaacagcgacgtgcccctggtgtaccaggatgagctgatccagatccgcgagctgatgtacaagccttacaaggactgggtcgccttcctgaagcagctccacaagagactggaagtcgagatcggcaaagaagtgaagcactggcggaagtccctgagcgacggaagaaagggcctgtacggcatctccctgaagaacatcgacgagatcgatcggacccggaagttcctgctgagatggtccctgaggcctaccgaacctggcgaagtgcgtagactggaacccggccagagattcgccatcgaccagctgaatcacctgaacgccctgaaagaagatcggctgaagaagatggccaacaccatcatcatgcacgccctgggctactgctacgacgtgcggaagaagaaatggcaggctaagaaccccgcctgccagatcatcctgttcgaggatctgagcaactacaacccctacgaggaaaggtcccgcttcgagaacagcaagctcatgaagtggtccagacgcgagatccccagacaggttgcactgcagggcgagatctatggcctgcaagtgggagaagtgggcgctcagttcagcagcagattccacgccaagacaggcagccctggcatcagatgtagcgtcgtgaccaaagagaagctgcaggacaatcggttcttcaagaatctgcagagagagggcagactgaccctggacaaaatcgccgtgctgaaagagggcgatctgtacccagacaaaggcggcgagaagttcatcagcctgagcaaggatcggaagtgcgtgaccacacacgccgacatcaacgccgctcagaacctgcagaagcggttctggacaagaacccacggcttctacaaggtgtactgcaaggcctaccaggtggacggccagaccgtgtacatccctgagagcaaggaccagaagcagaagatcatcgaagagttcggcgagggctacttcattctgaaggacggggtgtacgaatgggtcaacgccggcaagctgaaaatcaagaagggcagctccaagcagagcagcagcgagctggtggatagcgacatcctgaaagacagcttcgacctggcctccgagctgaaaggcgaaaagctgatgctgtacagggaccccagcggcaatgtgttccccagcgacaaatggatggccgctggcgtgttcttcggaaagctggaacgcatcctgatcagcaagctgaccaaccagtactccatcagcaccatcgaggacgacagcagcaagcagtctatgaaaaggccggcggccacgaaaaaggccggccaggcaaaaaagaaaaag

SEQ ID NO: 261 - protein, 17 aa, synthetic construct
  REGION 1..17: note = synthetic peptide sequence
MAPKKKRKVGIHGVPAA

SEQ ID NO: 262 - DNA, 51 bp, synthetic construct
  misc_feature 1..51: note = synthetic oligonucleotide sequence
  source 1..51: mol_type = other DNA
atggccccaaagaagaagcggaaggtcggtatccacggagtcccagcagcc

SEQ ID NO: 263 - protein, 1554 aa, synthetic construct
  REGION 1..1554: note = 101 Cas9 TadAins 1015 polypeptide sequence
MDKKYSIGLAIGTNSVGWAVITDEYKVPSKKFKVLGNTDRHSIKKNLIGALLFDSGETAEATRLKRTARRRYTRRKNRICYLQEIFSNEMAKVDDSFFHRLEESFLVEEDKKHERHPIFGNIVDEVAYHEKYPTIYHLRKKLVDSTDKADLRLIYLALAHMIKFRGHFLIEGDLNPDNSDVDKLFIQLVQTYNQLFEENPINASGVDAKAILSARLSKSRRLENLIAQLPGEKKNGLFGNLIALSLGLTPNFKSNFDLAEDAKLQLSKDTYDDDLDNLLAQIGDQYADLFLAAKNLSDAILLSDILRVNTEITKAPLSASMIKRYDEHHQDLTLLKALVRQQLPEKYKEIFFDQSKNGYAGYIDGGASQEEFYKFIKPILEKMDGTEELLVKLNREDLLRKQRTFDNGSIPHQIHLGELHAILRRQEDFYPFLKDNREKIEKILTFRIPYYVGPLARGNSRFAWMTRKSEETITPWNFEEVVDKGASAQSFIERMTNFDKNLPNEKVLPKHSLLYEYFTVYNELTKVKYVTEGMRKPAFLSGEQKKAIVDLLFKTNRKVTVKQLKEDYFKKIECFDSVEISGVEDRFNASLGTYHDLLKIIKDKDFLDNEENEDILEDIVLTLTLFEDREMIEERLKTYAHLFDDKVMKQLKRRRYTGWGRLSRKLINGIRDKQSGKTILDFLKSDGFANRNFMQLIHDDSLTFKEDIQKAQVSGQGDSLHEHIANLAGSPAIKKGILQTVKVVDELVKVMGRHKPENIVIEMARENQTTQKGQKNSRERMKRIEEGIKELGSQILKEHPVENTQLQNEKLYLYYLQNGRDMYVDQELDINRLSDYDVDHIVPQSFLKDDSIDNKVLTRSDKNRGKSDNVPSEEVVKKMKNYWRQLLNAKLITQRKFDNLTKAERGGLSELDKAGFIKRQLVETRQITKHVAQILDSRMNTKYDENDKLIREVKVITLKSKLVSDFRKDFQFYKVREINNYHHAHDAYLNAVVGTALIKKYPKLESEFVYGDYKVGSSGSETPGTSESATPESSGSEVEFSHEYWMRHALTLAKRARDEREVPVGAVLVLNNRVIGEGWNRAIGLHDPTAHAEIMALRQGGLVMQNYRLIDATLYVTFEPCVMCAGAMIHSRIGRVVFGVRNAKTGAAGSLMDVLHYPGMNHRVEITEGILADECAALLCYFFRMPRQVFNAQKKAQSSTDYDVRKMIAKSEQEIGKATAKYFFYSNIMNFFKTEITLANGEIRKRPLIETNGETGEIVWDKGRDFATVRKVLSMPQVNIVKKTEVQTGGFSKESILPKRNSDKLIARKKDWDPKKYGGFDSPTVAYSVLVVAKVEKGKSKKLKSVKELLGITIMERSSFEKNPIDFLEAKGYKEVKKDLIIKLPKYSLFELENGRKRMLASAGELQKGNELALPSKYVNFLYLASHYEKLKGSPEDNEQKQLFVEQHKHYLDEIIEQISEFSKRVILADANLDKVLSAYNKHRDKPIREQAENIIHLFTLTNLGAPAAFKYFDTTIDRKRYTSTKEVLDATLIHQSITGLYETRIDLSQLGGD

SEQ ID NO: 264 - protein, 1554 aa, synthetic construct
  REGION 1..1554: note = 102 Cas9 TadAins 1022 polypeptide sequence
MDKKYSIGLAIGTNSVGWAVITDEYKVPSKKFKVLGNTDRHSIKKNLIGALLFDSGETAEATRLKRTARRRYTRRKNRICYLQEIFSNEMAKVDDSFFHRLEESFLVEEDKKHERHPIFGNIVDEVAYHEKYPTIYHLRKKLVDSTDKADLRLIYLALAHMIKFRGHFLIEGDLNPDNSDVDKLFIQLVQTYNQLFEENPINASGVDAKAILSARLSKSRRLENLIAQLPGEKKNGLFGNLIALSLGLTPNFKSNFDLAEDAKLQLSKDTYDDDLDNLLAQIGDQYADLFLAAKNLSDAILLSDILRVNTEITKAPLSASMIKRYDEHHQDLTLLKALVRQQLPEKYKEIFFDQSKNGYAGYIDGGASQEEFYKFIKPILEKMDGTEELLVKLNREDLLRKQRTFDNGSIPHQIHLGELHAILRRQEDFYPFLKDNREKIEKILTFRIPYYVGPLARGNSRFAWMTRKSEETITPWNFEEVVDKGASAQSFIERMTNFDKNLPNEKVLPKHSLLYEYFTVYNELTKVKYVTEGMRKPAFLSGEQKKAIVDLLFKTNRKVTVKQLKEDYFKKIECFDSVEISGVEDRFNASLGTYHDLLKIIKDKDFLDNEENEDILEDIVLTLTLFEDREMIEERLKTYAHLFDDKVMKQLKRRRYTGWGRLSRKLINGIRDKQSGKTILDFLKSDGFANRNFMQLIHDDSLTFKEDIQKAQVSGQGDSLHEHIANLAGSPAIKKGILQTVKVVDELVKVMGRHKPENIVIEMARENQTTQKGQKNSRERMKRIEEGIKELGSQILKEHPVENTQLQNEKLYLYYLQNGRDMYVDQELDINRLSDYDVDHIVPQSFLKDDSIDNKVLTRSDKNRGKSDNVPSEEVVKKMKNYWRQLLNAKLITQRKFDNLTKAERGGLSELDKAGFIKRQLVETRQITKHVAQILDSRMNTKYDENDKLIREVKVITLKSKLVSDFRKDFQFYKVREINNYHHAHDAYLNAVVGTALIKKYPKLESEFVYGDYKVYDVRKMIGSSGSETPGTSESATPESSGSEVEFSHEYWMRHALTLAKRARDEREVPVGAVLVLNNRVIGEGWNRAIGLHDPTAHAEIMALRQGGLVMQNYRLIDATLYVTFEPCVMCAGAMIHSRIGRVVFGVRNAKTGAAGSLMDVLHYPGMNHRVEITEGILADECAALLCYFFRMPRQVFNAQKKAQSSTDAKSEQEIGKATAKYFFYSNIMNFFKTEITLANGEIRKRPLIETNGETGEIVWDKGRDFATVRKVLSMPQVNIVKKTEVQTGGFSKESILPKRNSDKLIARKKDWDPKKYGGFDSPTVAYSVLVVAKVEKGKSKKLKSVKELLGITIMERSSFEKNPIDFLEAKGYKEVKKDLIIKLPKYSLFELENGRKRMLASAGELQKGNELALPSKYVNFLYLASHYEKLKGSPEDNEQKQLFVEQHKHYLDEIIEQISEFSKRVILADANLDKVLSAYNKHRDKPIREQAENIIHLFTLTNLGAPAAFKYFDTTIDRKRYTSTKEVLDATLIHQSITGLYETRIDLSQLGGD

SEQ ID NO: 265 - protein, 1554 aa, synthetic construct
  REGION 1..1554: note = 103 Cas9 TadAins 1029 polypeptide sequence
MDKKYSIGLAIGTNSVGWAVITDEYKVPSKKFKVLGNTDRHSIKKNLIGALLFDSGETAEATRLKRTARRRYTRRKNRICYLQEIFSNEMAKVDDSFFHRLEESFLVEEDKKHERHPIFGNIVDEVAYHEKYPTIYHLRKKLVDSTDKADLRLIYLALAHMIKFRGHFLIEGDLNPDNSDVDKLFIQLVQTYNQLFEENPINASGVDAKAILSARLSKSRRLENLIAQLPGEKKNGLFGNLIALSLGLTPNFKSNFDLAEDAKLQLSKDTYDDDLDNLLAQIGDQYADLFLAAKNLSDAILLSDILRVNTEITKAPLSASMIKRYDEHHQDLTLLKALVRQQLPEKYKEIFFDQSKNGYAGYIDGGASQEEFYKFIKPILEKMDGTEELLVKLNREDLLRKQRTFDNGSIPHQIHLGELHAILRRQEDFYPFLKDNREKIEKILTFRIPYYVGPLARGNSRFAWMTRKSEETITPWNFEEVVDKGASAQSFIERMTNFDKNLPNEKVLPKHSLLYEYFTVYNELTKVKYVTEGMRKPAFLSGEQKKAIVDLLFKTNRKVTVKQLKEDYFKKIECFDSVEISGVEDRFNASLGTYHDLLKIIKDKDFLDNEENEDILEDIVLTLTLFEDREMIEERLKTYAHLFDDKVMKQLKRRRYTGWGRLSRKLINGIRDKQSGKTILDFLKSDGFANRNFMQLIHDDSLTFKEDIQKAQVSGQGDSLHEHIANLAGSPAIKKGILQTVKVVDELVKVMGRHKPENIVIEMARENQTTQKGQKNSRERMKRIEEGIKELGSQILKEHPVENTQLQNEKLYLYYLQNGRDMYVDQELDINRLSDYDVDHIVPQSFLKDDSIDNKVLTRSDKNRGKSDNVPSEEVVKKMKNYWRQLLNAKLITQRKFDNLTKAERGGLSELDKAGFIKRQLVETRQITKHVAQILDSRMNTKYDENDKLIREVKVITLKSKLVSDFRKDFQFYKVREINNYHHAHDAYLNAVVGTALIKKYPKLESEFVYGDYKVYDVRKMIAKSEQEIGSSGSETPGTSESATPESSGSEVEFSHEYWMRHALTLAKRARDEREVPVGAVLVLNNRVIGEGWNRAIGLHDPTAHAEIMALRQGGLVMQNYRLIDATLYVTFEPCVMCAGAMIHSRIGRVVFGVRNAKTGAAGSLMDVLHYPGMNHRVEITEGILADECAALLCYFFRMPRQVFNAQKKAQSSTDGKATAKYFFYSNIMNFFKTEITLANGEIRKRPLIETNGETGEIVWDKGRDFATVRKVLSMPQVNIVKKTEVQTGGFSKESILPKRNSDKLIARKKDWDPKKYGGFDSPTVAYSVLVVAKVEKGKSKKLKSVKELLGITIMERSSFEKNPIDFLEAKGYKEVKKDLIIKLPKYSLFELENGRKRMLASAGELQKGNELALPSKYVNFLYLASHYEKLKGSPEDNEQKQLFVEQHKHYLDEIIEQISEFSKRVILADANLDKVLSAYNKHRDKPIREQAENIIHLFTLTNLGAPAAFKYFDTTIDRKRYTSTKEVLDATLIHQSITGLYETRIDLSQLGGD

SEQ ID NO: 266 - protein, 1554 aa, synthetic construct
  REGION 1..1554: note = 103 Cas9 TadAins 1040 polypeptide sequence
MDKKYSIGLAIGTNSVGWAVITDEYKVPSKKFKVLGNTDRHSIKKNLIGALLFDSGETAEATRLKRTARRRYTRRKNRICYLQEIFSNEMAKVDDSFFHRLEESFLVEEDKKHERHPIFGNIVDEVAYHEKYPTIYHLRKKLVDSTDKADLRLIYLALAHMIKFRGHFLIEGDLNPDNSDVDKLFIQLVQTYNQLFEENPINASGVDAKAILSARLSKSRRLENLIAQLPGEKKNGLFGNLIALSLGLTPNFKSNFDLAEDAKLQLSKDTYDDDLDNLLAQIGDQYADLFLAAKNLSDAILLSDILRVNTEITKAPLSASMIKRYDEHHQDLTLLKALVRQQLPEKYKEIFFDQSKNGYAGYIDGGASQEEFYKFIKPILEKMDGTEELLVKLNREDLLRKQRTFDNGSIPHQIHLGELHAILRRQEDFYPFLKDNREKIEKILTFRIPYYVGPLARGNSRFAWMTRKSEETITPWNFEEVVDKGASAQSFIERMTNFDKNLPNEKVLPKHSLLYEYFTVYNELTKVKYVTEGMRKPAFLSGEQKKAIVDLLFKTNRKVTVKQLKEDYFKKIECFDSVEISGVEDRFNASLGTYHDLLKIIKDKDFLDNEENEDILEDIVLTLTLFEDREMIEERLKTYAHLFDDKVMKQLKRRRYTGWGRLSRKLINGIRDKQSGKTILDFLKSDGFANRNFMQLIHDDSLTFKEDIQKAQVSGQGDSLHEHIANLAGSPAIKKGILQTVKVVDELVKVMGRHKPENIVIEMARENQTTQKGQKNSRERMKRIEEGIKELGSQILKEHPVENTQLQNEKLYLYYLQNGRDMYVDQELDINRLSDYDVDHIVPQSFLKDDSIDNKVLTRSDKNRGKSDNVPSEEVVKKMKNYWRQLLNAKLITQRKFDNLTKAERGGLSELDKAGFIKRQLVETRQITKHVAQILDSRMNTKYDENDKLIREVKVITLKSKLVSDFRKDFQFYKVREINNYHHAHDAYLNAVVGTALIKKYPKLESEFVYGDYKVYDVRKMIAKSEQEIGKATAKYFFYSGSSGSETPGTSESATPESSGSEVEFSHEYWMRHALTLAKRARDEREVPVGAVLVLNNRVIGEGWNRAIGLHDPTAHAEIMALRQGGLVMQNYRLIDATLYVTFEPCVMCAGAMIHSRIGRVVFGVRNAKTGAAGSLMDVLHYPGMNHRVEITEGILADECAALLCYFFRMPRQVFNAQKKAQSSTDNIMNFFKTEITLANGEIRKRPLIETNGETGEIVWDKGRDFATVRKVLSMPQVNIVKKTEVQTGGFSKESILPKRNSDKLIARKKDWDPKKYGGFDSPTVAYSVLVVAKVEKGKSKKLKSVKELLGITIMERSSFEKNPIDFLEAKGYKEVKKDLIIKLPKYSLFELENGRKRMLASAGELQKGNELALPSKYVNFLYLASHYEKLKGSPEDNEQKQLFVEQHKHYLDEIIEQISEFSKRVILADANLDKVLSAYNKHRDKPIREQAENIIHLFTLTNLGAPAAFKYFDTTIDRKRYTSTKEVLDATLIHQSITGLYETRIDLSQLGGD

SEQ ID NO: 267 - protein, 1554 aa, synthetic construct
  REGION 1..1554: note = 105 Cas9 TadAins 1068 polypeptide sequence
MDKKYSIGLAIGTNSVGWAVITDEYKVPSKKFKVLGNTDRHSIKKNLIGALLFDSGETAEATRLKRTARRRYTRRKNRICYLQEIFSNEMAKVDDSFFHRLEESFLVEEDKKHERHPIFGNIVDEVAYHEKYPTIYHLRKKLVDSTDKADLRLIYLALAHMIKFRGHFLIEGDLNPDNSDVDKLFIQLVQTYNQLFEENPINASGVDAKAILSARLSKSRRLENLIAQLPGEKKNGLFGNLIALSLGLTPNFKSNFDLAEDAKLQLSKDTYDDDLDNLLAQIGDQYADLFLAAKNLSDAILLSDILRVNTEITKAPLSASMIKRYDEHHQDLTLLKALVRQQLPEKYKEIFFDQSKNGYAGYIDGGASQEEFYKFIKPILEKMDGTEELLVKLNREDLLRKQRTFDNGSIPHQIHLGELHAILRRQEDFYPFLKDNREKIEKILTFRIPYYVGPLARGNSRFAWMTRKSEETITPWNFEEVVDKGASAQSFIERMTNFDKNLPNEKVLPKHSLLYEYFTVYNELTKVKYVTEGMRKPAFLSGEQKKAIVDLLFKTNRKVTVKQLKEDYFKKIECFDSVEISGVEDRFNASLGTYHDLLKIIKDKDFLDNEENEDILEDIVLTLTLFEDREMIEERLKTYAHLFDDKVMKQLKRRRYTGWGRLSRKLINGIRDKQSGKTILDFLKSDGFANRNFMQLIHDDSLTFKEDIQKAQVSGQGDSLHEHIANLAGSPAIKKGILQTVKVVDELVKVMGRHKPENIVIEMARENQTTQKGQKNSRERMKRIEEGIKELGSQILKEHPVENTQLQNEKLYLYYLQNGRDMYVDQELDINRLSDYDVDHIVPQSFLKDDSIDNKVLTRSDKNRGKSDNVPSEEVVKKMKNYWRQLLNAKLITQRKFDNLTKAERGGLSELDKAGFIKRQLVETRQITKHVAQILDSRMNTKYDENDKLIREVKVITLKSKLVSDFRKDFQFYKVREINNYHHAHDAYLNAVVGTALIKKYPKLESEFVYGDYKVYDVRKMIAKSEQEIGKATAKYFFYSNIMNFFKTEITLANGEIRKRPLIETNGEGSSGSETPGTSESATPESSGSEVEFSHEYWMRHALTLAKRARDEREVPVGAVLVLNNRVIGEGWNRAIGLHDPTAHAEIMALRQGGLVMQNYRLIDATLYVTFEPCVMCAGAMIHSRIGRVVFGVRNAKTGAAGSLMDVLHYPGMNHRVEITEGILADECAALLCYFFRMPRQVFNAQKKAQSSTDTGEIVWDKGRDFATVRKVLSMPQVNIVKKTEVQTGGFSKESILPKRNSDKLIARKKDWDPKKYGGFDSPTVAYSVLVVAKVEKGKSKKLKSVKELLGITIMERSSFEKNPIDFLEAKGYKEVKKDLIIKLPKYSLFELENGRKRMLASAGELQKGNELALPSKYVNFLYLASHYEKLKGSPEDNEQKQLFVEQHKHYLDEIIEQISEFSKRVILADANLDKVLSAYNKHRDKPIREQAENIIHLFTLTNLGAPAAFKYFDTTIDRKRYTSTKEVLDATLIHQSITGLYETRIDLSQLGGD

SEQ ID NO: 268 - protein, 1554 aa, synthetic construct
  REGION 1..1554: note = 106 Cas9 TadAins 1247 polypeptide sequence
MDKKYSIGLAIGTNSVGWAVITDEYKVPSKKFKVLGNTDRHSIKKNLIGALLFDSGETAEATRLKRTARRRYTRRKNRICYLQEIFSNEMAKVDDSFFHRLEESFLVEEDKKHERHPIFGNIVDEVAYHEKYPTIYHLRKKLVDSTDKADLRLIYLALAHMIKFRGHFLIEGDLNPDNSDVDKLFIQLVQTYNQLFEENPINASGVDAKAILSARLSKSRRLENLIAQLPGEKKNGLFGNLIALSLGLTPNFKSNFDLAEDAKLQLSKDTYDDDLDNLLAQIGDQYADLFLAAKNLSDAILLSDILRVNTEITKAPLSASMIKRYDEHHQDLTLLKALVRQQLPEKYKEIFFDQSKNGYAGYIDGGASQEEFYKFIKPILEKMDGTEELLVKLNREDLLRKQRTFDNGSIPHQIHLGELHAILRRQEDFYPFLKDNREKIEKILTFRIPYYVGPLARGNSRFAWMTRKSEETITPWNFEEVVDKGASAQSFIERMTNFDKNLPNEKVLPKHSLLYEYFTVYNELTKVKYVTEGMRKPAFLSGEQKKAIVDLLFKTNRKVTVKQLKEDYFKKIECFDSVEISGVEDRFNASLGTYHDLLKIIKDKDFLDNEENEDILEDIVLTLTLFEDREMIEERLKTYAHLFDDKVMKQLKRRRYTGWGRLSRKLINGIRDKQSGKTILDFLKSDGFANRNFMQLIHDDSLTFKEDIQKAQVSGQGDSLHEHIANLAGSPAIKKGILQTVKVVDELVKVMGRHKPENIVIEMARENQTTQKGQKNSRERMKRIEEGIKELGSQILKEHPVENTQLQNEKLYLYYLQNGRDMYVDQELDINRLSDYDVDHIVPQSFLKDDSIDNKVLTRSDKNRGKSDNVPSEEVVKKMKNYWRQLLNAKLITQRKFDNLTKAERGGLSELDKAGFIKRQLVETRQITKHVAQILDSRMNTKYDENDKLIREVKVITLKSKLVSDFRKDFQFYKVREINNYHHAHDAYLNAVVGTALIKKYPKLESEFVYGDYKVYDVRKMIAKSEQEIGKATAKYFFYSNIMNFFKTEITLANGEIRKRPLIETNGETGEIVWDKGRDFATVRKVLSMPQVNIVKKTEVQTGGFSKESILPKRNSDKLIARKKDWDPKKYGGFDSPTVAYSVLVVAKVEKGKSKKLKSVKELLGITIMERSSFEKNPIDFLEAKGYKEVKKDLIIKLPKYSLFELENGRKRMLASAGELQKGNELALPSKYVNFLYLASHYEKLKGGSSGSETPGTSESATPESSGSEVEFSHEYWMRHALTLAKRARDEREVPVGAVLVLNNRVIGEGWNRAIGLHDPTAHAEIMALRQGGLVMQNYRLIDATLYVTFEPCVMCAGAMIHSRIGRVVFGVRNAKTGAAGSLMDVLHYPGMNHRVEITEGILADECAALLCYFFRMPRQVFNAQKKAQSSTDSPEDNEQKQLFVEQHKHYLDEIIEQISEFSKRVILADANLDKVLSAYNKHRDKPIREQAENIIHLFTLTNLGAPAAFKYFDTTIDRKRYTSTKEVLDATLIHQSITGLYETRIDLSQLGGD

SEQ ID NO: 269 - protein, 1554 aa, synthetic construct
  REGION 1..1554: note = 107 Cas9 TadAins 1054 polypeptide sequence
MDKKYSIGLAIGTNSVGWAVITDEYKVPSKKFKVLGNTDRHSIKKNLIGALLFDSGETAEATRLKRTARRRYTRRKNRICYLQEIFSNEMAKVDDSFFHRLEESFLVEEDKKHERHPIFGNIVDEVAYHEKYPTIYHLRKKLVDSTDKADLRLIYLALAHMIKFRGHFLIEGDLNPDNSDVDKLFIQLVQTYNQLFEENPINASGVDAKAILSARLSKSRRLENLIAQLPGEKKNGLFGNLIALSLGLTPNFKSNFDLAEDAKLQLSKDTYDDDLDNLLAQIGDQYADLFLAAKNLSDAILLSDILRVNTEITKAPLSASMIKRYDEHHQDLTLLKALVRQQLPEKYKEIFFDQSKNGYAGYIDGGASQEEFYKFIKPILEKMDGTEELLVKLNREDLLRKQRTFDNGSIPHQIHLGELHAILRRQEDFYPFLKDNREKIEKILTFRIPYYVGPLARGNSRFAWMTRKSEETITPWNFEEVVDKGASAQSFIERMTNFDKNLPNEKVLPKHSLLYEYFTVYNELTKVKYVTEGMRKPAFLSGEQKKAIVDLLFKTNRKVTVKQLKEDYFKKIECFDSVEISGVEDRFNASLGTYHDLLKIIKDKDFLDNEENEDILEDIVLTLTLFEDREMIEERLKTYAHLFDDKVMKQLKRRRYTGWGRLSRKLINGIRDKQSGKTILDFLKSDGFANRNFMQLIHDDSLTFKEDIQKAQVSGQGDSLHEHIANLAGSPAIKKGILQTVKVVDELVKVMGRHKPENIVIEMARENQTTQKGQKNSRERMKRIEEGIKELGSQILKEHPVENTQLQNEKLYLYYLQNGRDMYVDQELDINRLSDYDVDHIVPQSFLKDDSIDNKVLTRSDKNRGKSDNVPSEEVVKKMKNYWRQLLNAKLITQRKFDNLTKAERGGLSELDKAGFIKRQLVETRQITKHVAQILDSRMNTKYDENDKLIREVKVITLKSKLVSDFRKDFQFYKVREINNYHHAHDAYLNAVVGTALIKKYPKLESEFVYGDYKVYDVRKMIAKSEQEIGKATAKYFFYSNIMNFFKTEITLANGSSGSETPGTSESATPESSGSEVEFSHEYWMRHALTLAKRARDEREVPVGAVLVLNNRVIGEGWNRAIGLHDPTAHAEIMALRQGGLVMQNYRLIDATLYVTFEPCVMCAGAMIHSRIGRVVFGVRNAKTGAAGSLMDVLHYPGMNHRVEITEGILADECAALLCYFFRMPRQVFNAQKKAQSSTDGEIRKRPLIETNGETGEIVWDKGRDFATVRKVLSMPQVNIVKKTEVQTGGFSKESILPKRNSDKLIARKKDWDPKKYGGFDSPTVAYSVLVVAKVEKGKSKKLKSVKELLGITIMERSSFEKNPIDFLEAKGYKEVKKDLIIKLPKYSLFELENGRKRMLASAGELQKGNELALPSKYVNFLYLASHYEKLKGSPEDNEQKQLFVEQHKHYLDEIIEQISEFSKRVILADANLDKVLSAYNKHRDKPIREQAENIIHLFTLTNLGAPAAFKYFDTTIDRKRYTSTKEVLDATLIHQSITGLYETRIDLSQLGGD

SEQ ID NO: 270 - protein, 1554 aa, synthetic construct
  REGION 1..1554: note = 108 Cas9 TadAins 1026 polypeptide sequence
MDKKYSIGLAIGTNSVGWAVITDEYKVPSKKFKVLGNTDRHSIKKNLIGALLFDSGETAEATRLKRTARRRYTRRKNRICYLQEIFSNEMAKVDDSFFHRLEESFLVEEDKKHERHPIFGNIVDEVAYHEKYPTIYHLRKKLVDSTDKADLRLIYLALAHMIKFRGHFLIEGDLNPDNSDVDKLFIQLVQTYNQLFEENPINASGVDAKAILSARLSKSRRLENLIAQLPGEKKNGLFGNLIALSLGLTPNFKSNFDLAEDAKLQLSKDTYDDDLDNLLAQIGDQYADLFLAAKNLSDAILLSDILRVNTEITKAPLSASMIKRYDEHHQDLTLLKALVRQQLPEKYKEIFFDQSKNGYAGYIDGGASQEEFYKFIKPILEKMDGTEELLVKLNREDLLRKQRTFDNGSIPHQIHLGELHAILRRQEDFYPFLKDNREKIEKILTFRIPYYVGPLARGNSRFAWMTRKSEETITPWNFEEVVDKGASAQSFIERMTNFDKNLPNEKVLPKHSLLYEYFTVYNELTKVKYVTEGMRKPAFLSGEQKKAIVDLLFKTNRKVTVKQLKEDYFKKIECFDSVEISGVEDRFNASLGTYHDLLKIIKDKDFLDNEENEDILEDIVLTLTLFEDREMIEERLKTYAHLFDDKVMKQLKRRRYTGWGRLSRKLINGIRDKQSGKTILDFLKSDGFANRNFMQLIHDDSLTFKEDIQKAQVSGQGDSLHEHIANLAGSPAIKKGILQTVKVVDELVKVMGRHKPENIVIEMARENQTTQKGQKNSRERMKRIEEGIKELGSQILKEHPVENTQLQNEKLYLYYLQNGRDMYVDQELDINRLSDYDVDHIVPQSFLKDDSIDNKVLTRSDKNRGKSDNVPSEEVVKKMKNYWRQLLNAKLITQRKFDNLTKAERGGLSELDKAGFIKRQLVETRQITKHVAQILDSRMNTKYDENDKLIREVKVITLKSKLVSDFRKDFQFYKVREINNYHHAHDAYLNAVVGTALIKKYPKLESEFVYGDYKVYDVRKMIAKSEGSSGSETPGTSESATPESSGSEVEFSHEYWMRHALTLAKRARDEREVPVGAVLVLNNRVIGEGWNRAIGLHDPTAHAEIMALRQGGLVMQNYRLIDATLYVTFEPCVMCAGAMIHSRIGRVVFGVRNAKTGAAGSLMDVLHYPGMNHRVEITEGILADECAALLCYFFRMPRQVFNAQKKAQSSTDQEIGKATAKYFFYSNIMNFFKTEITLANGEIRKRPLIETNGETGEIVWDKGRDFATVRKVLSMPQVNIVKKTEVQTGGFSKESILPKRNSDKLIARKKDWDPKKYGGFDSPTVAYSVLVVAKVEKGKSKKLKSVKELLGITIMERSSFEKNPIDFLEAKGYKEVKKDLIIKLPKYSLFELENGRKRMLASAGELQKGNELALPSKYVNFLYLASHYEKLKGSPEDNEQKQLFVEQHKHYLDEIIEQISEFSKRVILADANLDKVLSAYNKHRDKPIREQAENIIHLFTLTNLGAPAAFKYFDTTIDRKRYTSTKEVLDATLIHQSITGLYETRIDLSQLGGD

SEQ ID NO: 271 - protein, 1540 aa, synthetic construct
  REGION 1..1540: note = 109 Cas9 TadAins 768 polypeptide sequence
MDKKYSIGLAIGTNSVGWAVITDEYKVPSKKFKVLGNTDRHSIKKNLIGALLFDSGETAEATRLKRTARRRYTRRKNRICYLQEIFSNEMAKVDDSFFHRLEESFLVEEDKKHERHPIFGNIVDEVAYHEKYPTIYHLRKKLVDSTDKADLRLIYLALAHMIKFRGHFLIEGDLNPDNSDVDKLFIQLVQTYNQLFEENPINASGVDAKAILSARLSKSRRLENLIAQLPGEKKNGLFGNLIALSLGLTPNFKSNFDLAEDAKLQLSKDTYDDDLDNLLAQIGDQYADLFLAAKNLSDAILLSDILRVNTEITKAPLSASMIKRYDEHHQDLTLLKALVRQQLPEKYKEIFFDQSKNGYAGYIDGGASQEEFYKFIKPILEKMDGTEELLVKLNREDLLRKQRTFDNGSIPHQIHLGELHAILRRQEDFYPFLKDNREKIEKILTFRIPYYVGPLARGNSRFAWMTRKSEETITPWNFEEVVDKGASAQSFIERMTNFDKNLPNEKVLPKHSLLYEYFTVYNELTKVKYVTEGMRKPAFLSGEQKKAIVDLLFKTNRKVTVKQLKEDYFKKIECFDSVEISGVEDRFNASLGTYHDLLKIIKDKDFLDNEENEDILEDIVLTLTLFEDREMIEERLKTYAHLFDDKVMKQLKRRRYTGWGRLSRKLINGIRDKQSGKTILDFLKSDGFANRNFMQLIHDDSLTFKEDIQKAQVSGQGDSLHEHIANLAGSPAIKKGILQTVKVVDELVKVMGRHKPENIVIEMARENQGSSGSETPGTSESATPESSGSEVEFSHEYWMRHALTLAKRARDEREVPVGAVLVLNNRVIGEGWNRAIGLHDPTAHAEIMALRQGGLVMQNYRLIDATLYVTFEPCVMCAGAMIHSRIGRVVFGVRNAKTGAAGSLMDVLHYPGMNHRVEITEGILADECAALLCYFFRMPRTTQKGQKNSRERMKRIEEGIKELGSQILKEHPVENTQLQNEKLYLYYLQNGRDMYVDQELDINRLSDYDVDHIVPQSFLKDDSIDNKVLTRSDKNRGKSDNVPSEEVVKKMKNYWRQLLNAKLITQRKFDNLTKAERGGLSELDKAGFIKRQLVETRQITKHVAQILDSRMNTKYDENDKLIREVKVITLKSKLVSDFRKDFQFYKVREINNYHHAHDAYLNAVVGTALIKKYPKLESEFVYGDYKVYDVRKMIAKSEQEIGKATAKYFFYSNIMNFFKTEITLANGEIRKRPLIETNGETGEIVWDKGRDFATVRKVLSMPQVNIVKKTEVQTGGFSKESILPKRNSDKLIARKKDWDPKKYGGFDSPTVAYSVLVVAKVEKGKSKKLKSVKELLGITIMERSSFEKNPIDFLEAKGYKEVKKDLIIKLPKYSLFELENGRKRMLASAGELQKGNELALPSKYVNFLYLASHYEKLKGSPEDNEQKQLFVEQHKHYLDEIIEQISEFSKRVILADANLDKVLSAYNKHRDKPIREQAENIIHLFTLTNLGAPAAFKYFDTTIDRKRYTSTKEVLDATLIHQSITGLYETRIDLSQLGGD

SEQ ID NO: 272 - protein, 1540 aa, synthetic construct
  REGION 1..1540: note = 110.1 Cas9 TadAins 1250 polypeptide sequence
MDKKYSIGLAIGTNSVGWAVITDEYKVPSKKFKVLGNTDRHSIKKNLIGALLFDSGETAEATRLKRTARRRYTRRKNRICYLQEIFSNEMAKVDDSFFHRLEESFLVEEDKKHERHPIFGNIVDEVAYHEKYPTIYHLRKKLVDSTDKADLRLIYLALAHMIKFRGHFLIEGDLNPDNSDVDKLFIQLVQTYNQLFEENPINASGVDAKAILSARLSKSRRLENLIAQLPGEKKNGLFGNLIALSLGLTPNFKSNFDLAEDAKLQLSKDTYDDDLDNLLAQIGDQYADLFLAAKNLSDAILLSDILRVNTEITKAPLSASMIKRYDEHHQDLTLLKALVRQQLPEKYKEIFFDQSKNGYAGYIDGGASQEEFYKFIKPILEKMDGTEELLVKLNREDLLRKQRTFDNGSIPHQIHLGELHAILRRQEDFYPFLKDNREKIEKILTFRIPYYVGPLARGNSRFAWMTRKSEETITPWNFEEVVDKGASAQSFIERMTNFDKNLPNEKVLPKHSLLYEYFTVYNELTKVKYVTEGMRKPAFLSGEQKKAIVDLLFKTNRKVTVKQLKEDYFKKIECFDSVEISGVEDRFNASLGTYHDLLKIIKDKDFLDNEENEDILEDIVLTLTLFEDREMIEERLKTYAHLFDDKVMKQLKRRRYTGWGRLSRKLINGIRDKQSGKTILDFLKSDGFANRNFMQLIHDDSLTFKEDIQKAQVSGQGDSLHEHIANLAGSPAIKKGILQTVKVVDELVKVMGRHKPENIVIEMARENQTTQKGQKNSRERMKRIEEGIKELGSQILKEHPVENTQLQNEKLYLYYLQNGRDMYVDQELDINRLSDYDVDHIVPQSFLKDDSIDNKVLTRSDKNRGKSDNVPSEEVVKKMKNYWRQLLNAKLITQRKFDNLTKAERGGLSELDKAGFIKRQLVETRQITKHVAQILDSRMNTKYDENDKLIREVKVITLKSKLVSDFRKDFQFYKVREINNYHHAHDAYLNAVVGTALIKKYPKLESEFVYGDYKVYDVRKMIAKSEQEIGKATAKYFFYSNIMNFFKTEITLANGEIRKRPLIETNGETGEIVWDKGRDFATVRKVLSMPQVNIVKKTEVQTGGFSKESILPKRNSDKLIARKKDWDPKKYGGFDSPTVAYSVLVVAKVEKGKSKKLKSVKELLGITIMERSSFEKNPIDFLEAKGYKEVKKDLIIKLPKYSLFELENGRKRMLASAGELQKGNELALPSKYVNFLYLASHYEKLKGSPGSSGSETPGTSESATPESSGSEVEFSHEYWMRHALTLAKRARDEREVPVGAVLVLNNRVIGEGWNRAIGLHDPTAHAEIMALRQGGLVMQNYRLIDATLYVTFEPCVMCAGAMIHSRIGRVVFGVRNAKTGAAGSLMDVLHYPGMNHRVEITEGILADECAALLCYFFRMPREDNEQKQLFVEQHKHYLDEIIEQISEFSKRVILADANLDKVLSAYNKHRDKPIREQAENIIHLFTLTNLGAPAAFKYFDTTIDRKRYTSTKEVLDATLIHQSITGLYETRIDLSQLGGD

SEQ ID NO: 273 - protein, 1543 aa, synthetic construct
  REGION 1..1543: note = 110.2 Cas9 TadAins 1250 polypeptide sequence
MDKKYSIGLAIGTNSVGWAVITDEYKVPSKKFKVLGNTDRHSIKKNLIGALLFDSGETAEATRLKRTARRRYTRRKNRICYLQEIFSNEMAKVDDSFFHRLEESFLVEEDKKHERHPIFGNIVDEVAYHEKYPTIYHLRKKLVDSTDKADLRLIYLALAHMIKFRGHFLIEGDLNPDNSDVDKLFIQLVQTYNQLFEENPINASGVDAKAILSARLSKSRRLENLIAQLPGEKKNGLFGNLIALSLGLTPNFKSNFDLAEDAKLQLSKDTYDDDLDNLLAQIGDQYADLFLAAKNLSDAILLSDILRVNTEITKAPLSASMIKRYDEHHQDLTLLKALVRQQLPEKYKEIFFDQSKNGYAGYIDGGASQEEFYKFIKPILEKMDGTEELLVKLNREDLLRKQRTFDNGSIPHQIHLGELHAILRRQEDFYPFLKDNREKIEKILTFRIPYYVGPLARGNSRFAWMTRKSEETITPWNFEEVVDKGASAQSFIERMTNFDKNLPNEKVLPKHSLLYEYFTVYNELTKVKYVTEGMRKPAFLSGEQKKAIVDLLFKTNRKVTVKQLKEDYFKKIECFDSVEISGVEDRFNASLGTYHDLLKIIKDKDFLDNEENEDILEDIVLTLTLFEDREMIEERLKTYAHLFDDKVMKQLKRRRYTGWGRLSRKLINGIRDKQSGKTILDFLKSDGFANRNFMQLIHDDSLTFKEDIQKAQVSGQGDSLHEHIANLAGSPAIKKGILQTVKVVDELVKVMGRHKPENIVIEMARENQTTQKGQKNSRERMKRIEEGIKELGSQILKEHPVENTQLQNEKLYLYYLQNGRDMYVDQELDINRLSDYDVDHIVPQSFLKDDSIDNKVLTRSDKNRGKSDNVPSEEVVKKMKNYWRQLLNAKLITQRKFDNLTKAERGGLSELDKAGFIKRQLVETRQITKHVAQILDSRMNTKYDENDKLIREVKVITLKSKLVSDFRKDFQFYKVREINNYHHAHDAYLNAVVGTALIKKYPKLESEFVYGDYKVYDVRKMIAKSEQEIGKATAKYFFYSNIMNFFKTEITLANGEIRKRPLIETNGETGEIVWDKGRDFATVRKVLSMPQVNIVKKTEVQTGGFSKESILPKRNSDKLIARKKDWDPKKYGGFDSPTVAYSVLVVAKVEKGKSKKLKSVKELLGITIMERSSFEKNPIDFLEAKGYKEVKKDLIIKLPKYSLFELENGRKRMLASAGELQKGNELALPSKYVNFLYLASHYEKLKGSPGSSGSSGSETPGTSESATPESSGSEVEFSHEYWMRHALTLAKRARDEREVPVGAVLVLNNRVIGEGWNRAIGLHDPTAHAEIMALRQGGLVMQNYRLIDATLYVTFEPCVMCAGAMIHSRIGRVVFGVRNAKTGAAGSLMDVLHYPGMNHRVEITEGILADECAALLCYFFRMPREDNEQKQLFVEQHKHYLDEIIEQISEFSKRVILADANLDKVLSAYNKHRDKPIREQAENIIHLFTLTNLGAPAAFKYFDTTIDRKRYTSTKEVLDATLIHQSITGLYETRIDLSQLGGD

SEQ ID NO: 274 - protein, 1546 aa, synthetic construct
  REGION 1..1546: note = 110.3 Cas9 TadAins 1250 polypeptide sequence
MDKKYSIGLAIGTNSVGWAVITDEYKVPSKKFKVLGNTDRHSIKKNLIGALLFDSGETAEATRLKRTARRRYTRRKNRICYLQEIFSNEMAKVDDSFFHRLEESFLVEEDKKHERHPIFGNIVDEVAYHEKYPTIYHLRKKLVDSTDKADLRLIYLALAHMIKFRGHFLIEGDLNPDNSDVDKLFIQLVQTYNQLFEENPINASGVDAKAILSARLSKSRRLENLIAQLPGEKKNGLFGNLIALSLGLTPNFKSNFDLAEDAKLQLSKDTYDDDLDNLLAQIGDQYADLFLAAKNLSDAILLSDILRVNTEITKAPLSASMIKRYDEHHQDLTLLKALVRQQLPEKYKEIFFDQSKNGYAGYIDGGASQEEFYKFIKPILEKMDGTEELLVKLNREDLLRKQRTFDNGSIPHQIHLGELHAILRRQEDFYPFLKDNREKIEKILTFRIPYYVGPLARGNSRFAWMTRKSEETITPWNFEEVVDKGASAQSFIERMTNFDKNLPNEKVLPKHSLLYEYFTVYNELTKVKYVTEGMRKPAFLSGEQKKAIVDLLFKTNRKVTVKQLKEDYFKKIECFDSVEISGVEDRFNASLGTYHDLLKIIKDKDFLDNEENEDILEDIVLTLTLFEDREMIEERLKTYAHLFDDKVMKQLKRRRYTGWGRLSRKLINGIRDKQSGKTILDFLKSDGFANRNFMQLIHDDSLTFKEDIQKAQVSGQGDSLHEHIANLAGSPAIKKGILQTVKVVDELVKVMGRHKPENIVIEMARENQTTQKGQKNSRERMKRIEEGIKELGSQILKEHPVENTQLQNEKLYLYYLQNGRDMYVDQELDINRLSDYDVDHIVPQSFLKDDSIDNKVLTRSDKNRGKSDNVPSEEVVKKMKNYWRQLLNAKLITQRKFDNLTKAERGGLSELDKAGFIKRQLVETRQITKHVAQILDSRMNTKYDENDKLIREVKVITLKSKLVSDFRKDFQFYKVREINNYHHAHDAYLNAVVGTALIKKYPKLESEFVYGDYKVYDVRKMIAKSEQEIGKATAKYFFYSNIMNFFKTEITLANGEIRKRPLIETNGETGEIVWDKGRDFATVRKVLSMPQVNIVKKTEVQTGGFSKESILPKRNSDKLIARKKDWDPKKYGGFDSPTVAYSVLVVAKVEKGKSKKLKSVKELLGITIMERSSFEKNPIDFLEAKGYKEVKKDLIIKLPKYSLFELENGRKRMLASAGELQKGNELALPSKYVNFLYLASHYEKLKGSPGSSGSSGSETPGTSESATPESGSSSGSEVEFSHEYWMRHALTLAKRARDEREVPVGAVLVLNNRVIGEGWNRAIGLHDPTAHAEIMALRQGGLVMQNYRLIDATLYVTFEPCVMCAGAMIHSRIGRVVFGVRNAKTGAAGSLMDVLHYPGMNHRVEITEGILADECAALLCYFFRMPREDNEQKQLFVEQHKHYLDEIIEQISEFSKRVILADANLDKVLSAYNKHRDKPIREQAENIIHLFTLTNLGAPAAFKYFDTTIDRKRYTSTKEVLDATLIHQSITGLYETRIDLSQLGGD

SEQ ID NO: 275 - protein, 1546 aa, synthetic construct
  REGION 1..1546: note = 110.4 Cas9 TadAins 1250 polypeptide sequence
MDKKYSIGLAIGTNSVGWAVITDEYKVPSKKFKVLGNTDRHSIKKNLIGALLFDSGETAEATRLKRTARRRYTRRKNRICYLQEIFSNEMAKVDDSFFHRLEESFLVEEDKKHERHPIFGNIVDEVAYHEKYPTIYHLRKKLVDSTDKADLRLIYLALAHMIKFRGHFLIEGDLNPDNSDVDKLFIQLVQTYNQLFEENPINASGVDAKAILSARLSKSRRLENLIAQLPGEKKNGLFGNLIALSLGLTPNFKSNFDLAEDAKLQLSKDTYDDDLDNLLAQIGDQYADLFLAAKNLSDAILLSDILRVNTEITKAPLSASMIKRYDEHHQDLTLLKALVRQQLPEKYKEIFFDQSKNGYAGYIDGGASQEEFYKFIKPILEKMDGTEELLVKLNREDLLRKQRTFDNGSIPHQIHLGELHAILRRQEDFYPFLKDNREKIEKILTFRIPYYVGPLARGNSRFAWMTRKSEETITPWNFEEVVDKGASAQSFIERMTNFDKNLPNEKVLPKHSLLYEYFTVYNELTKVKYVTEGMRKPAFLSGEQKKAIVDLLFKTNRKVTVKQLKEDYFKKIECFDSVEISGVEDRFNASLGTYHDLLKIIKDKDFLDNEENEDILEDIVLTLTLFEDREMIEERLKTYAHLFDDKVMKQLKRRRYTGWGRLSRKLINGIRDKQSGKTILDFLKSDGFANRNFMQLIHDDSLTFKEDIQKAQVSGQGDSLHEHIANLAGSPAIKKGILQTVKVVDELVKVMGRHKPENIVIEMARENQTTQKGQKNSRERMKRIEEGIKELGSQILKEHPVENTQLQNEKLYLYYLQNGRDMYVDQELDINRLSDYDVDHIVPQSFLKDDSIDNKVLTRSDKNRGKSDNVPSEEVVKKMKNYWRQLLNAKLITQRKFDNLTKAERGGLSELDKAGFIKRQLVETRQITKHVAQILDSRMNTKYDENDKLIREVKVITLKSKLVSDFRKDFQFYKVREINNYHHAHDAYLNAVVGTALIKKYPKLESEFVYGDYKVYDVRKMIAKSEQEIGKATAKYFFYSNIMNFFKTEITLANGEIRKRPLIETNGETGEIVWDKGRDFATVRKVLSMPQVNIVKKTEVQTGGFSKESILPKRNSDKLIARKKDWDPKKYGGFDSPTVAYSVLVVAKVEKGKSKKLKSVKELLGITIMERSSFEKNPIDFLEAKGYKEVKKDLIIKLPKYSLFELENGRKRMLASAGELQKGNELALPSKYVNFLYLASHYEKLKGSPGSSGSSGSETPGTSESATPESGSSSGSEVEFSHEYWMRHALTLAKRARDEREVPVGAVLVLNNRVIGEGWNRAIGLHDPTAHAEIMALRQGGLVMQNYRLIDATLYVTFEPCVMCAGAMIHSRIGRVVFGVRNAKTGAAGSLMDVLHYPGMNHRVEITEGILADECAALLCYFFRMRREDNEQKQLFVEQHKHYLDEIIEQISEFSKRVILADANLDKVLSAYNKHRDKPIREQAENIIHLFTLTNLGAPAAFKYFDTTIDRKRYTSTKEVLDATLIHQSITGLYETRIDLSQLGGD

SEQ ID NO: 276 - protein, 1546 aa, synthetic construct
  REGION 1..1546: note = 110.5 Cas9 TadAins 1249 polypeptide sequence
MDKKYSIGLAIGTNSVGWAVITDEYKVPSKKFKVLGNTDRHSIKKNLIGALLFDSGETAEATRLKRTARRRYTRRKNRICYLQEIFSNEMAKVDDSFFHRLEESFLVEEDKKHERHPIFGNIVDEVAYHEKYPTIYHLRKKLVDSTDKADLRLIYLALAHMIKFRGHFLIEGDLNPDNSDVDKLFIQLVQTYNQLFEENPINASGVDAKAILSARLSKSRRLENLIAQLPGEKKNGLFGNLIALSLGLTPNFKSNFDLAEDAKLQLSKDTYDDDLDNLLAQIGDQYADLFLAAKNLSDAILLSDILRVNTEITKAPLSASMIKRYDEHHQDLTLLKALVRQQLPEKYKEIFFDQSKNGYAGYIDGGASQEEFYKFIKPILEKMDGTEELLVKLNREDLLRKQRTFDNGSIPHQIHLGELHAILRRQEDFYPFLKDNREKIEKILTFRIPYYVGPLARGNSRFAWMTRKSEETITPWNFEEVVDKGASAQSFIERMTNFDKNLPNEKVLPKHSLLYEYFTVYNELTKVKYVTEGMRKPAFLSGEQKKAIVDLLFKTNRKVTVKQLKEDYFKKIECFDSVEISGVEDRFNASLGTYHDLLKIIKDKDFLDNEENEDILEDIVLTLTLFEDREMIEERLKTYAHLFDDKVMKQLKRRRYTGWGRLSRKLINGIRDKQSGKTILDFLKSDGFANRNFMQLIHDDSLTFKEDIQKAQVSGQGDSLHEHIANLAGSPAIKKGILQTVKVVDELVKVMGRHKPENIVIEMARENQTTQKGQKNSRERMKRIEEGIKELGSQILKEHPVENTQLQNEKLYLYYLQNGRDMYVDQELDINRLSDYDVDHIVPQSFLKDDSIDNKVLTRSDKNRGKSDNVPSEEVVKKMKNYWRQLLNAKLITQRKFDNLTKAERGGLSELDKAGFIKRQLVETRQITKHVAQILDSRMNTKYDENDKLIREVKVITLKSKLVSDFRKDFQFYKVREINNYHHAHDAYLNAVVGTALIKKYPKLESEFVYGDYKVYDVRKMIAKSEQEIGKATAKYFFYSNIMNFFKTEITLANGEIRKRPLIETNGETGEIVWDKGRDFATVRKVLSMPQVNIVKKTEVQTGGFSKESILPKRNSDKLIARKKDWDPKKYGGFDSPTVAYSVLVVAKVEKGKSKKLKSVKELLGITIMERSSFEKNPIDFLEAKGYKEVKKDLIIKLPKYSLFELENGRKRMLASAGELQKGNELALPSKYVNFLYLASHYEKLKGSGSSGSSGSETPGTSESATPESGSSSGSEVEFSHEYWMRHALTLAKRARDEREVPVGAVLVLNNRVIGEGWNRAIGLHDPTAHAEIMALRQGGLVMQNYRLIDATLYVTFEPCVMCAGAMIHSRIGRVVFGVRNAKTGAAGSLMDVLHYPGMNHRVEITEGILADECAALLCYFFRMRRPEDNEQKQLFVEQHKHYLDEIIEQISEFSKRVILADANLDKVLSAYNKHRDKPIREQAENIIHLFTLTNLGAPAAFKYFDTTIDRKRYTSTKEVLDATLIHQSITGLYETRIDLSQLGGD

SEQ ID NO: 277 - protein, 1551 aa, synthetic construct
  REGION 1..1551: note = 110.5 Cas9 TadAins delta59-66 1250 polypeptide sequence
MDKKYSIGLAIGTNSVGWAVITDEYKVPSKKFKVLGNTDRHSIKKNLIGALLFDSGETAEATRLKRTARRRYTRRKNRICYLQEIFSNEMAKVDDSFFHRLEESFLVEEDKKHERHPIFGNIVDEVAYHEKYPTIYHLRKKLVDSTDKADLRLIYLALAHMIKFRGHFLIEGDLNPDNSDVDKLFIQLVQTYNQLFEENPINASGVDAKAILSARLSKSRRLENLIAQLPGEKKNGLFGNLIALSLGLTPNFKSNFDLAEDAKLQLSKDTYDDDLDNLLAQIGDQYADLFLAAKNLSDAILLSDILRVNTEITKAPLSASMIKRYDEHHQDLTLLKALVRQQLPEKYKEIFFDQSKNGYAGYIDGGASQEEFYKFIKPILEKMDGTEELLVKLNREDLLRKQRTFDNGSIPHQIHLGELHAILRRQEDFYPFLKDNREKIEKILTFRIPYYVGPLARGNSRFAWMTRKSEETITPWNFEEVVDKGASAQSFIERMTNFDKNLPNEKVLPKHSLLYEYFTVYNELTKVKYVTEGMRKPAFLSGEQKKAIVDLLFKTNRKVTVKQLKEDYFKKIECFDSVEISGVEDRFNASLGTYHDLLKIIKDKDFLDNEENEDILEDIVLTLTLFEDREMIEERLKTYAHLFDDKVMKQLKRRRYTGWGRLSRKLINGIRDKQSGKTILDFLKSDGFANRNFMQLIHDDSLTFKEDIQKAQVSGQGDSLHEHIANLAGSPAIKKGILQTVKVVDELVKVMGRHKPENIVIEMARENQTTQKGQKNSRERMKRIEEGIKELGSQILKEHPVENTQLQNEKLYLYYLQNGRDMYVDQELDINRLSDYDVDHIVPQSFLKDDSIDNKVLTRSDKNRGKSDNVPSEEVVKKMKNYWRQLLNAKLITQRKFDNLTKAERGGLSELDKAGFIKRQLVETRQITKHVAQILDSRMNTKYDENDKLIREVKVITLKSKLVSDFRKDFQFYKVREINNYHHAHDAYLNAVVGTALIKKYPKLESEFVYGDYKVYDVRKMIAKSEQEIGKATAKYFFYSNIMNFFKTEITLANGEIRKRPLIETNGETGEIVWDKGRDFATVRKVLSMPQVNIVKKTEVQTGGFSKESILPKRNSDKLIARKKDWDPKKYGGFDSPTVAYSVLVVAKVEKGKSKKLKSVKELLGITIMERSSFEKNPIDFLEAKGYKEVKKDLIIKLPKYSLFELENGRKRMLASAGELQKGNELALPSKYVNFLYLASHYEKLKGSPGSSGSSGSETPGTSESATPESGSSGSEVEFSHEYWMRHALTLAKRARDEREVPVGAVLVLNNRVIGEGWNRAHAEIMALRQGGLVMQNYRLIDATLYVTFEPCVMCAGAMIHSRIGRVVFGVRNAKTGAAGSLMDVLHYPGMNHRVEITEGILADECAALLCYFFRMPRQVFNAQKKAQSSTDEDNEQKQLFVEQHKHYLDEIIEQISEFSKRVILADANLDKVLSAYNKHRDKPIREQAENIIHLFTLTNLGAPAAFKYFDTTIDRKRYTSTKEVLDATLIHQSITGLYETRIDLSQLGGD

SEQ ID NO: 278 - protein, 1546 aa, synthetic construct
  REGION 1..1546: note = 110.6 Cas9 TadAins 1251 polypeptide sequence
MDKKYSIGLAIGTNSVGWAVITDEYKVPSKKFKVLGNTDRHSIKKNLIGALLFDSGETAEATRLKRTARRRYTRRKNRICYLQEIFSNEMAKVDDSFFHRLEESFLVEEDKKHERHPIFGNIVDEVAYHEKYPTIYHLRKKLVDSTDKADLRLIYLALAHMIKFRGHFLIEGDLNPDNSDVDKLFIQLVQTYNQLFEENPINASGVDAKAILSARLSKSRRLENLIAQLPGEKKNGLFGNLIALSLGLTPNFKSNFDLAEDAKLQLSKDTYDDDLDNLLAQIGDQYADLFLAAKNLSDAILLSDILRVNTEITKAPLSASMIKRYDEHHQDLTLLKALVRQQLPEKYKEIFFDQSKNGYAGYIDGGASQEEFYKFIKPILEKMDGTEELLVKLNREDLLRKQRTFDNGSIPHQIHLGELHAILRRQEDFYPFLKDNREKIEKILTFRIPYYVGPLARGNSRFAWMTRKSEETITPWNFEEVVDKGASAQSFIERMTNFDKNLPNEKVLPKHSLLYEYFTVYNELTKVKYVTEGMRKPAFLSGEQKKAIVDLLFKTNRKVTVKQLKEDYFKKIECFDSVEISGVEDRFNASLGTYHDLLKIIKDKDFLDNEENEDILEDIVLTLTLFEDREMIEERLKTYAHLFDDKVMKQLKRRRYTGWGRLSRKLINGIRDKQSGKTILDFLKSDGFANRNFMQLIHDDSLTFKEDIQKAQVSGQGDSLHEHIANLAGSPAIKKGILQTVKVVDELVKVMGRHKPENIVIEMARENQTTQKGQKNSRERMKRIEEGIKELGSQILKEHPVENTQLQNEKLYLYYLQNGRDMYVDQELDINRLSDYDVDHIVPQSFLKDDSIDNKVLTRSDKNRGKSDNVPSEEVVKKMKNYWRQLLNAKLITQRKFDNLTKAERGGLSELDKAGFIKRQLVETRQITKHVAQILDSRMNTKYDENDKLIREVKVITLKSKLVSDFRKDFQFYKVREINNYHHAHDAYLNAVVGTALIKKYPKLESEFVYGDYKVYDVRKMIAKSEQEIGKATAKYFFYSNIMNFFKTEITLANGEIRKRPLIETNGETGEIVWDKGRDFATVRKVLSMPQVNIVKKTEVQTGGFSKESILPKRNSDKLIARKKDWDPKKYGGFDSPTVAYSVLVVAKVEKGKSKKLKSVKELLGITIMERSSFEKNPIDFLEAKGYKEVKKDLIIKLPKYSLFELENGRKRMLASAGELQKGNELALPSKYVNFLYLASHYEKLKGSPEGSSGSSGSETPGTSESATPESGSSSGSEVEFSHEYWMRHALTLAKRARDEREVPVGAVLVLNNRVIGEGWNRAIGLHDPTAHAEIMALRQGGLVMQNYRLIDATLYVTFEPCVMCAGAMIHSRIGRVVFGVRNAKTGAAGSLMDVLHYPGMNHRVEITEGILADECAALLCYFFRMRRDNEQKQLFVEQHKHYLDEIIEQISEFSKRVILADANLDKVLSAYNKHRDKPIREQAENIIHLFTLTNLGAPAAFKYFDTTIDRKRYTSTKEVLDATLIHQSITGLYETRIDLSQLGGD

SEQ ID NO: 279 - protein, 1546 aa, synthetic construct
  REGION 1..1546: note = 110.7 Cas9 TadAins 1252 polypeptide sequence
MDKKYSIGLAIGTNSVGWAVITDEYKVPSKKFKVLGNTDRHSIKKNLIGALLFDSGETAEATRLKRTARRRYTRRKNRICYLQEIFSNEMAKVDDSFFHRLEESFLVEEDKKHERHPIFGNIVDEVAYHEKYPTIYHLRKKLVDSTDKADLRLIYLALAHMIKFRGHFLIEGDLNPDNSDVDKLFIQLVQTYNQLFEENPINASGVDAKAILSARLSKSRRLENLIAQLPGEKKNGLFGNLIALSLGLTPNFKSNFDLAEDAKLQLSKDTYDDDLDNLLAQIGDQYADLFLAAKNLSDAILLSDILRVNTEITKAPLSASMIKRYDEHHQDLTLLKALVRQQLPEKYKEIFFDQSKNGYAGYIDGGASQEEFYKFIKPILEKMDGTEELLVKLNREDLLRKQRTFDNGSIPHQIHLGELHAILRRQEDFYPFLKDNREKIEKILTFRIPYYVGPLARGNSRFAWMTRKSEETITPWNFEEVVDKGASAQSFIERMTNFDKNLPNEKVLPKHSLLYEYFTVYNELTKVKYVTEGMRKPAFLSGEQKKAIVDLLFKTNRKVTVKQLKEDYFKKIECFDSVEISGVEDRFNASLGTYHDLLKIIKDKDFLDNEENEDILEDIVLTLTLFEDREMIEERLKTYAHLFDDKVMKQLKRRRYTGWGRLSRKLINGIRDKQSGKTILDFLKSDGFANRNFMQLIHDDSLTFKEDIQKAQVSGQGDSLHEHIANLAGSPAIKKGILQTVKVVDELVKVMGRHKPENIVIEMARENQTTQKGQKNSRERMKRIEEGIKELGSQILKEHPVENTQLQNEKLYLYYLQNGRDMYVDQELDINRLSDYDVDHIVPQSFLKDDSIDNKVLTRSDKNRGKSDNVPSEEVVKKMKNYWRQLLNAKLITQRKFDNLTKAERGGLSELDKAGFIKRQLVETRQITKHVAQILDSRMNTKYDENDKLIREVKVITLKSKLVSDFRKDFQFYKVREINNYHHAHDAYLNAVVGTALIKKYPKLESEFVYGDYKVYDVRKMIAKSEQEIGKATAKYFFYSNIMNFFKTEITLANGEIRKRPLIETNGETGEIVWDKGRDFATVRKVLSMPQVNIVKKTEVQTGGFSKESILPKRNSDKLIARKKDWDPKKYGGFDSPTVAYSVLVVAKVEKGKSKKLKSVKELLGITIMERSSFEKNPIDFLEAKGYKEVKKDLIIKLPKYSLFELENGRKRMLASAGELQKGNELALPSKYVNFLYLASHYEKLKGSPEDGSSGSSGSETPGTSESATPESGSSSGSEVEFSHEYWMRHALTLAKRARDEREVPVGAVLVLNNRVIGEGWNRAIGLHDPTAHAEIMALRQGGLVMQNYRLIDATLYVTFEPCVMCAGAMIHSRIGRVVFGVRNAKTGAAGSLMDVLHYPGMNHRVEITEGILADECAALLCYFFRMRRNEQKQLFVEQHKHYLDEIIEQISEFSKRVILADANLDKVLSAYNKHRDKPIREQAENIIHLFTLTNLGAPAAFKYFDTTIDRKRYTSTKEVLDATLIHQSITGLYETRIDLSQLGGD

SEQ ID NO: 280 - protein, 1533 aa, synthetic construct
  REGION 1..1533: note = 110.8 Cas9 TadAins delta59-66 C-truncate 1250 polypeptide sequence
MDKKYSIGLAIGTNSVGWAVITDEYKVPSKKFKVLGNTDRHSIKKNLIGALLFDSGETAEATRLKRTARRRYTRRKNRICYLQEIFSNEMAKVDDSFFHRLEESFLVEEDKKHERHPIFGNIVDEVAYHEKYPTIYHLRKKLVDSTDKADLRLIYLALAHMIKFRGHFLIEGDLNPDNSDVDKLFIQLVQTYNQLFEENPINASGVDAKAILSARLSKSRRLENLIAQLPGEKKNGLFGNLIALSLGLTPNFKSNFDLAEDAKLQLSKDTYDDDLDNLLAQIGDQYADLFLAAKNLSDAILLSDILRVNTEITKAPLSASMIKRYDEHHQDLTLLKALVRQQLPEKYKEIFFDQSKNGYAGYIDGGASQEEFYKFIKPILEKMDGTEELLVKLNREDLLRKQRTFDNGSIPHQIHLGELHAILRRQEDFYPFLKDNREKIEKILTFRIPYYVGPLARGNSRFAWMTRKSEETITPWNFEEVVDKGASAQSFIERMTNFDKNLPNEKVLPKHSLLYEYFTVYNELTKVKYVTEGMRKPAFLSGEQKKAIVDLLFKTNRKVTVKQLKEDYFKKIECFDSVEISGVEDRFNASLGTYHDLLKIIKDKDFLDNEENEDILEDIVLTLTLFEDREMIEERLKTYAHLFDDKVMKQLKRRRYTGWGRLSRKLINGIRDKQSGKTILDFLKSDGFANRNFMQLIHDDSLTFKEDIQKAQVSGQGDSLHEHIANLAGSPAIKKGILQTVKVVDELVKVMGRHKPENIVIEMARENQTTQKGQKNSRERMKRIEEGIKELGSQILKEHPVENTQLQNEKLYLYYLQNGRDMYVDQELDINRLSDYDVDHIVPQSFLKDDSIDNKVLTRSDKNRGKSDNVPSEEVVKKMKNYWRQLLNAKLITQRKFDNLTKAERGGLSELDKAGFIKRQLVETRQITKHVAQILDSRMNTKYDENDKLIREVKVITLKSKLVSDFRKDFQFYKVREINNYHHAHDAYLNAVVGTALIKKYPKLESEFVYGDYKVYDVRKMIAKSEQEIGKATAKYFFYSNIMNFFKTEITLANGEIRKRPLIETNGETGEIVWDKGRDFATVRKVLSMPQVNIVKKTEVQTGGFSKESILPKRNSDKLIARKKDWDPKKYGGFDSPTVAYSVLVVAKVEKGKSKKLKSVKELLGITIMERSSFEKNPIDFLEAKGYKEVKKDLIIKLPKYSLFELENGRKRMLASAGELQKGNELALPSKYVNFLYLASHYEKLKGSPGSSGSETPGTSESATPESSGSEVEFSHEYWMRHALTLAKRARDEREVPVGAVLVLNNRVIGEGWNRAHAEIMALRQGGLVMQNYRLIDATLYVTFEPCVMCAGAMIHSRIGRVVFGVRNAKTGAAGSLMDVLHYPGMNHRVEITEGILADECAALLCYFFRMPRQEDNEQKQLFVEQHKHYLDEIIEQISEFSKRVILADANLDKVLSAYNKHRDKPIREQAENIIHLFTLTNLGAPAAFKYFDTTIDRKRYTSTKEVLDATLIHQSITGLYETRIDLSQLGGD

SEQ ID NO: 281 - protein, 1549 aa, synthetic construct
  REGION 1..1549: note = 111.1 Cas9 TadAins 997 polypeptide sequence
MDKKYSIGLAIGTNSVGWAVITDEYKVPSKKFKVLGNTDRHSIKKNLIGALLFDSGETAEATRLKRTARRRYTRRKNRICYLQEIFSNEMAKVDDSFFHRLEESFLVEEDKKHERHPIFGNIVDEVAYHEKYPTIYHLRKKLVDSTDKADLRLIYLALAHMIKFRGHFLIEGDLNPDNSDVDKLFIQLVQTYNQLFEENPINASGVDAKAILSARLSKSRRLENLIAQLPGEKKNGLFGNLIALSLGLTPNFKSNFDLAEDAKLQLSKDTYDDDLDNLLAQIGDQYADLFLAAKNLSDAILLSDILRVNTEITKAPLSASMIKRYDEHHQDLTLLKALVRQQLPEKYKEIFFDQSKNGYAGYIDGGASQEEFYKFIKPILEKMDGTEELLVKLNREDLLRKQRTFDNGSIPHQIHLGELHAILRRQEDFYPFLKDNREKIEKILTFRIPYYVGPLARGNSRFAWMTRKSEETITPWNFEEVVDKGASAQSFIERMTNFDKNLPNEKVLPKHSLLYEYFTVYNELTKVKYVTEGMRKPAFLSGEQKKAIVDLLFKTNRKVTVKQLKEDYFKKIECFDSVEISGVEDRFNASLGTYHDLLKIIKDKDFLDNEENEDILEDIVLTLTLFEDREMIEERLKTYAHLFDDKVMKQLKRRRYTGWGRLSRKLINGIRDKQSGKTILDFLKSDGFANRNFMQLIHDDSLTFKEDIQKAQVSGQGDSLHEHIANLAGSPAIKKGILQTVKVVDELVKVMGRHKPENIVIEMARENQTTQKGQKNSRERMKRIEEGIKELGSQILKEHPVENTQLQNEKLYLYYLQNGRDMYVDQELDINRLSDYDVDHIVPQSFLKDDSIDNKVLTRSDKNRGKSDNVPSEEVVKKMKNYWRQLLNAKLITQRKFDNLTKAERGGLSELDKAGFIKRQLVETRQITKHVAQILDSRMNTKYDENDKLIREVKVITLKSKLVSDFRKDFQFYKVREINNYHHAHDAYLNAVVGTALSHEYWMRHALTLAKRARDEREVPVGAVLVLNNRVIGEGWNRAIGLHDPTAHAEIMALRQGGLVMQNYRLIDATLYVTFEPCVMCAGAMIHSRIGRVVFGVRNAKTGAAGSLMDVLHYPGMNHRVEITEGILADECAALLCYFFRMPRQVFNAQKKAQSSTDGSSGSETPGTSESATPESSGIKKYPKLESEFVYGDYKVYDVRKMIAKSEQEIGKATAKYFFYSNIMNFFKTEITLANGEIRKRPLIETNGETGEIVWDKGRDFATVRKVLSMPQVNIVKKTEVQTGGFSKESILPKRNSDKLIARKKDWDPKKYGGFDSPTVAYSVLVVAKVEKGKSKKLKSVKELLGITIMERSSFEKNPIDFLEAKGYKEVKKDLIIKLPKYSLFELENGRKRMLASAGELQKGNELALPSKYVNFLYLASHYEKLKGSPEDNEQKQLFVEQHKHYLDEIIEQISEFSKRVILADANLDKVLSAYNKHRDKPIREQAENIIHLFTLTNLGAPAAFKYFDTTIDRKRYTSTKEVLDATLIHQSITGLYETRIDLSQLGGD

SEQ ID NO: 282 - protein, 1555 aa, synthetic construct
  REGION 1..1555: note = 111.2 Cas9 TadAins 997 polypeptide sequence
MDKKYSIGLAIGTNSVGWAVITDEYKVPSKKFKVLGNTDRHSIKKNLIGALLFDSGETAEATRLKRTARRRYTRRKNRICYLQEIFSNEMAKVDDSFFHRLEESFLVEEDKKHERHPIFGNIVDEVAYHEKYPTIYHLRKKLVDSTDKADLRLIYLALAHMIKFRGHFLIEGDLNPDNSDVDKLFIQLVQTYNQLFEENPINASGVDAKAILSARLSKSRRLENLIAQLPGEKKNGLFGNLIALSLGLTPNFKSNFDLAEDAKLQLSKDTYDDDLDNLLAQIGDQYADLFLAAKNLSDAILLSDILRVNTEITKAPLSASMIKRYDEHHQDLTLLKALVRQQLPEKYKEIFFDQSKNGYAGYIDGGASQEEFYKFIKPILEKMDGTEELLVKLNREDLLRKQRTFDNGSIPHQIHLGELHAILRRQEDFYPFLKDNREKIEKILTFRIPYYVGPLARGNSRFAWMTRKSEETITPWNFEEVVDKGASAQSFIERMTNFDKNLPNEKVLPKHSLLYEYFTVYNELTKVKYVTEGMRKPAFLSGEQKKAIVDLLFKTNRKVTVKQLKEDYFKKIECFDSVEISGVEDRFNASLGTYHDLLKIIKDKDFLDNEENEDILEDIVLTLTLFEDREMIEERLKTYAHLFDDKVMKQLKRRRYTGWGRLSRKLINGIRDKQSGKTILDFLKSDGFANRNFMQLIHDDSLTFKEDIQKAQVSGQGDSLHEHIANLAGSPAIKKGILQTVKVVDELVKVMGRHKPENIVIEMARENQTTQKGQKNSRERMKRIEEGIKELGSQILKEHPVENTQLQNEKLYLYYLQNGRDMYVDQELDINRLSDYDVDHIVPQSFLKDDSIDNKVLTRSDKNRGKSDNVPSEEVVKKMKNYWRQLLNAKLITQRKFDNLTKAERGGLSELDKAGFIKRQLVETRQITKHVAQILDSRMNTKYDENDKLIREVKVITLKSKLVSDFRKDFQFYKVREINNYHHAHDAYLNAVVGTALSHEYWMRHALTLAKRARDEREVPVGAVLVLNNRVIGEGWNRAIGLHDPTAHAEIMALRQGGLVMQNYRLIDATLYVTFEPCVMCAGAMIHSRIGRVVFGVRNAKTGAAGSLMDVLHYPGMNHRVEITEGILADECAALLCYFFRMPRQVFNAQKKAQSSTDGSSGSSGSETPGTSESATPESSGGSSIKKYPKLESEFVYGDYKVYDVRKMIAKSEQEIGKATAKYFFYSNIMNFFKTEITLANGEIRKRPLIETNGETGEIVWDKGRDFATVRKVLSMPQVNIVKKTEVQTGGFSKESILPKRNSDKLIARKKDWDPKKYGGFDSPTVAYSVLVVAKVEKGKSKKLKSVKELLGITIMERSSFEKNPIDFLEAKGYKEVKKDLIIKLPKYSLFELENGRKRMLASAGELQKGNELALPSKYVNFLYLASHYEKLKGSPEDNEQKQLFVEQHKHYLDEIIEQISEFSKRVILADANLDKVLSAYNKHRDKPIREQAENIIHLFTLTNLGAPAAFKYFDTTIDRKRYTSTKEVLDATLIHQSITGLYETRIDLSQLGGD

SEQ ID NO: 283 - protein, 1421 aa, synthetic construct
  REGION 1..1421: note = 112 delta HNH TadA polypeptide sequence
MDKKYSIGLAIGTNSVGWAVITDEYKVPSKKFKVLGNTDRHSIKKNLIGALLFDSGETAEATRLKRTARRRYTRRKNRICYLQEIFSNEMAKVDDSFFHRLEESFLVEEDKKHERHPIFGNIVDEVAYHEKYPTIYHLRKKLVDSTDKADLRLIYLALAHMIKFRGHFLIEGDLNPDNSDVDKLFIQLVQTYNQLFEENPINASGVDAKAILSARLSKSRRLENLIAQLPGEKKNGLFGNLIALSLGLTPNFKSNFDLAEDAKLQLSKDTYDDDLDNLLAQIGDQYADLFLAAKNLSDAILLSDILRVNTEITKAPLSASMIKRYDEHHQDLTLLKALVRQQLPEKYKEIFFDQSKNGYAGYIDGGASQEEFYKFIKPILEKMDGTEELLVKLNREDLLRKQRTFDNGSIPHQIHLGELHAILRRQEDFYPFLKDNREKIEKILTFRIPYYVGPLARGNSRFAWMTRKSEETITPWNFEEVVDKGASAQSFIERMTNFDKNLPNEKVLPKHSLLYEYFTVYNELTKVKYVTEGMRKPAFLSGEQKKAIVDLLFKTNRKVTVKQLKEDYFKKIECFDSVEISGVEDRFNASLGTYHDLLKIIKDKDFLDNEENEDILEDIVLTLTLFEDREMIEERLKTYAHLFDDKVMKQLKRRRYTGWGRLSRKLINGIRDKQSGKTILDFLKSDGFANRNFMQLIHDDSLTFKEDIQKAQVSGQGDSLHEHIANLAGSPAIKKGILQTVKVVDELVKVMGRHKPENIVIEMARENQTTQKGQKNSRERMKRIEEGIKELGSEVEFSHEYWMRHALTLAKRARDEREVPVGAVLVLNNRVIGEGWNRAIGLHDPTAHAEIMALRQGGLVMQNYRLIDATLYVTFEPCVMCAGAMIHSRIGRVVFGVRNAKTGAAGSLMDVLHYPGMNHRVEITEGILADECAALLCYFFRMPRQVFNAQKKAQSSTDGGLSELDKAGFIKRQLVETRQITKHVAQILDSRMNTKYDENDKLIREVKVITLKSKLVSDFRKDFQFYKVREINNYHHAHDAYLNAVVGTALIKKYPKLESEFVYGDYKVYDVRKMIAKSEQEIGKATAKYFFYSNIMNFFKTEITLANGEIRKRPLIETNGETGEIVWDKGRDFATVRKVLSMPQVNIVKKTEVQTGGFSKESILPKRNSDKLIARKKDWDPKKYGGFDSPTVAYSVLVVAKVEKGKSKKLKSVKELLGITIMERSSFEKNPIDFLEAKGYKEVKKDLIIKLPKYSLFELENGRKRMLASAGELQKGNELALPSKYVNFLYLASHYEKLKGSPEDNEQKQLFVEQHKHYLDEIIEQISEFSKRVILADANLDKVLSAYNKHRDKPIREQAENIIHLFTLTNLGAPAAFKYFDTTIDRKRYTSTKEVLDATLIHQSITGLYETRIDLSQLGGD

SEQ ID NO: 284 - protein, 1552 aa, synthetic construct
  REGION 1..1552: note = 113 N-term single TadA helixtrunc 165-end polypeptide sequence
MSEVEFSHEYWMRHALTLAKRARDEREVPVGAVLVLNNRVIGEGWNRAIGLHDPTAHAEIMALRQGGLVMQNYRLIDATLYVTFEPCVMCAGAMIHSRIGRVVFGVRNAKTGAAGSLMDVLHYPGMNHRVEITEGILADECAALLCYFFRMPRSGGSSGGSSGSETPGTSESATPESSGGSSGGSDKKYSIGLAIGTNSVGWAVITDEYKVPSKKFKVLGNTDRHSIKKNLIGALLFDSGETAEATRLKRTARRRYTRRKNRICYLQEIFSNEMAKVDDSFFHRLEESFLVEEDKKHERHPIFGNIVDEVAYHEKYPTIYHLRKKLVDSTDKADLRLIYLALAHMIKFRGHFLIEGDLNPDNSDVDKLFIQLVQTYNQLFEENPINASGVDAKAILSARLSKSRRLENLIAQLPGEKKNGLFGNLIALSLGLTPNFKSNFDLAEDAKLQLSKDTYDDDLDNLLAQIGDQYADLFLAAKNLSDAILLSDILRVNTEITKAPLSASMIKRYDEHHQDLTLLKALVRQQLPEKYKEIFFDQSKNGYAGYIDGGASQEEFYKFIKPILEKMDGTEELLVKLNREDLLRKQRTFDNGSIPHQIHLGELHAILRRQEDFYPFLKDNREKIEKILTFRIPYYVGPLARGNSRFAWMTRKSEETITPWNFEEVVDKGASAQSFIERMTNFDKNLPNEKVLPKHSLLYEYFTVYNELTKVKYVTEGMRKPAFLSGEQKKAIVDLLFKTNRKVTVKQLKEDYFKKIECFDSVEISGVEDRFNASLGTYHDLLKIIKDKDFLDNEENEDILEDIVLTLTLFEDREMIEERLKTYAHLFDDKVMKQLKRRRYTGWGRLSRKLINGIRDKQSGKTILDFLKSDGFANRNFMQLIHDDSLTFKEDIQKAQVSGQGDSLHEHIANLAGSPAIKKGILQTVKVVDELVKVMGRHKPENIVIEMARENQTTQKGQKNSRERMKRIEEGIKELGSQILKEHPVENTQLQNEKLYLYYLQNGRDMYVDQELDINRLSDYDVDHIVPQSFLKDDSIDNKVLTRSDKNRGKSDNVPSEEVVKKMKNYWRQLLNAKLITQRKFDNLTKAERGGLSELDKAGFIKRQLVETRQITKHVAQILDSRMNTKYDENDKLIREVKVITLKSKLVSDFRKDFQFYKVREINNYHHAHDAYLNAVVGTALIKKYPKLESEFVYGDYKVYDVRKMIAKSEQEIGKATAKYFFYSNIMNFFKTEITLANGEIRKRPLIETNGETGEIVWDKGRDFATVRKVLSMPQVNIVKKTEVQTGGFSKESILPKRNSDKLIARKKDWDPKKYGGFDSPTVAYSVLVVAKVEKGKSKKLKSVKELLGITIMERSSFEKNPIDFLEAKGYKEVKKDLIIKLPKYSLFELENGRKRMLASAGELQKGNELALPSKYVNFLYLASHYEKLKGSPEDNEQKQLFVEQHKHYLDEIIEQISEFSKRVILADANLDKVLSAYNKHRDKPIREQAENIIHLFTLTNLGAPAAFKYFDTTIDRKRYTSTKEVLDATLIHQSITGLYETRIDLSQLGGD

SEQ ID NO: 285 - protein, 1545 aa, synthetic construct
  REGION 1..1545: note = 114 N-term single TadA helixtrunc 165-end delta 59-65 polypeptide sequence
MSEVEFSHEYWMRHALTLAKRARDEREVPVGAVLVLNNRVIGEGWNRTAHAEIMALRQGGLVMQNYRLIDATLYVTFEPCVMCAGAMIHSRIGRVVFGVRNAKTGAAGSLMDVLHYPGMNHRVEITEGILADECAALLCYFFRMPRSGGSSGGSSGSETPGTSESATPESSGGSSGGSDKKYSIGLAIGTNSVGWAVITDEYKVPSKKFKVLGNTDRHSIKKNLIGALLFDSGETAEATRLKRTARRRYTRRKNRICYLQEIFSNEMAKVDDSFFHRLEESFLVEEDKKHERHPIFGNIVDEVAYHEKYPTIYHLRKKLVDSTDKADLRLIYLALAHMIKFRGHFLIEGDLNPDNSDVDKLFIQLVQTYNQLFEENPINASGVDAKAILSARLSKSRRLENLIAQLPGEKKNGLFGNLIALSLGLTPNFKSNFDLAEDAKLQLSKDTYDDDLDNLLAQIGDQYADLFLAAKNLSDAILLSDILRVNTEITKAPLSASMIKRYDEHHQDLTLLKALVRQQLPEKYKEIFFDQSKNGYAGYIDGGASQEEFYKFIKPILEKMDGTEELLVKLNREDLLRKQRTFDNGSIPHQIHLGELHAILRRQEDFYPFLKDNREKIEKILTFRIPYYVGPLARGNSRFAWMTRKSEETITPWNFEEVVDKGASAQSFIERMTNFDKNLPNEKVLPKHSLLYEYFTVYNELTKVKYVTEGMRKPAFLSGEQKKAIVDLLFKTNRKVTVKQLKEDYFKKIECFDSVEISGVEDRFNASLGTYHDLLKIIKDKDFLDNEENEDILEDIVLTLTLFEDREMIEERLKTYAHLFDDKVMKQLKRRRYTGWGRLSRKLINGIRDKQSGKTILDFLKSDGFANRNFMQLIHDDSLTFKEDIQKAQVSGQGDSLHEHIANLAGSPAIKKGILQTVKVVDELVKVMGRHKPENIVIEMARENQTTQKGQKNSRERMKRIEEGIKELGSQILKEHPVENTQLQNEKLYLYYLQNGRDMYVDQELDINRLSDYDVDHIVPQSFLKDDSIDNKVLTRSDKNRGKSDNVPSEEVVKKMKNYWRQLLNAKLITQRKFDNLTKAERGGLSELDKAGFIKRQLVETRQITKHVAQILDSRMNTKYDENDKLIREVKVITLKSKLVSDFRKDFQFYKVREINNYHHAHDAYLNAVVGTALIKKYPKLESEFVYGDYKVYDVRKMIAKSEQEIGKATAKYFFYSNIMNFFKTEITLANGEIRKRPLIETNGETGEIVWDKGRDFATVRKVLSMPQVNIVKKTEVQTGGFSKESILPKRNSDKLIARKKDWDPKKYGGFDSPTVAYSVLVVAKVEKGKSKKLKSVKELLGITIMERSSFEKNPIDFLEAKGYKEVKKDLIIKLPKYSLFELENGRKRMLASAGELQKGNELALPSKYVNFLYLASHYEKLKGSPEDNEQKQLFVEQHKHYLDEIIEQISEFSKRVILADANLDKVLSAYNKHRDKPIREQAENIIHLFTLTNLGAPAAFKYFDTTIDRKRYTSTKEVLDATLIHQSITGLYETRIDLSQLGGD

SEQ ID NO: 286 - protein, 1541 aa, synthetic construct
  REGION 1..1541: note = 115.1 Cas9 TadAins 1004 polypeptide sequence
MDKKYSIGLAIGTNSVGWAVITDEYKVPSKKFKVLGNTDRHSIKKNLIGALLFDSGETAEATRLKRTARRRYTRRKNRICYLQEIFSNEMAKVDDSFFHRLEESFLVEEDKKHERHPIFGNIVDEVAYHEKYPTIYHLRKKLVDSTDKADLRLIYLALAHMIKFRGHFLIEGDLNPDNSDVDKLFIQLVQTYNQLFEENPINASGVDAKAILSARLSKSRRLENLIAQLPGEKKNGLFGNLIALSLGLTPNFKSNFDLAEDAKLQLSKDTYDDDLDNLLAQIGDQYADLFLAAKNLSDAILLSDILRVNTEITKAPLSASMIKRYDEHHQDLTLLKALVRQQLPEKYKEIFFDQSKNGYAGYIDGGASQEEFYKFIKPILEKMDGTEELLVKLNREDLLRKQRTFDNGSIPHQIHLGELHAILRRQEDFYPFLKDNREKIEKILTFRIPYYVGPLARGNSRFAWMTRKSEETITPWNFEEVVDKGASAQSFIERMTNFDKNLPNEKVLPKHSLLYEYFTVYNELTKVKYVTEGMRKPAFLSGEQKKAIVDLLFKTNRKVTVKQLKEDYFKKIECFDSVEISGVEDRFNASLGTYHDLLKIIKDKDFLDNEENEDILEDIVLTLTLFEDREMIEERLKTYAHLFDDKVMKQLKRRRYTGWGRLSRKLINGIRDKQSGKTILDFLKSDGFANRNFMQLIHDDSLTFKEDIQKAQVSGQGDSLHEHIANLAGSPAIKKGILQTVKVVDELVKVMGRHKPENIVIEMARENQTTQKGQKNSRERMKRIEEGIKELGSQILKEHPVENTQLQNEKLYLYYLQNGRDMYVDQELDINRLSDYDVDHIVPQSFLKDDSIDNKVLTRSDKNRGKSDNVPSEEVVKKMKNYWRQLLNAKLITQRKFDNLTKAERGGLSELDKAGFIKRQLVETRQITKHVAQILDSRMNTKYDENDKLIREVKVITLKSKLVSDFRKDFQFYKVREINNYHHAHDAYLNAVVGTALIKKYPKGSSGSETPGTSESATPESSGSEVEFSHEYWMRHALTLAKRARDEREVPVGAVLVLNNRVIGEGWNRAIGLHDPTAHAEIMALRQGGLVMQNYRLIDATLYVTFEPCVMCAGAMIHSRIGRVVFGVRNAKTGAAGSLMDVLHYPGMNHRVEITEGILADECAALLCYFFRMPRQLESEFVYGDYKVYDVRKMIAKSEQEIGKATAKYFFYSNIMNFFKTEITLANGEIRKRPLIETNGETGEIVWDKGRDFATVRKVLSMPQVNIVKKTEVQTGGFSKESILPKRNSDKLIARKKDWDPKKYGGFDSPTVAYSVLVVAKVEKGKSKKLKSVKELLGITIMERSSFEKNPIDFLEAKGYKEVKKDLIIKLPKYSLFELENGRKRMLASAGELQKGNELALPSKYVNFLYLASHYEKLKGSPEDNEQKQLFVEQHKHYLDEIIEQISEFSKRVILADANLDKVLSAYNKHRDKPIREQAENIIHLFTLTNLGAPAAFKYFDTTIDRKRYTSTKEVLDATLIHQSITGLYETRIDLSQLGGD

SEQ ID NO: 287 - protein, 1541 aa, synthetic construct
  REGION 1..1541: note = 115.2 Cas9 TadAins 1005 polypeptide sequence
MDKKYSIGLAIGTNSVGWAVITDEYKVPSKKFKVLGNTDRHSIKKNLIGALLFDSGETAEATRLKRTARRRYTRRKNRICYLQEIFSNEMAKVDDSFFHRLEESFLVEEDKKHERHPIFGNIVDEVAYHEKYPTIYHLRKKLVDSTDKADLRLIYLALAHMIKFRGHFLIEGDLNPDNSDVDKLFIQLVQTYNQLFEENPINASGVDAKAILSARLSKSRRLENLIAQLPGEKKNGLFGNLIALSLGLTPNFKSNFDLAEDAKLQLSKDTYDDDLDNLLAQIGDQYADLFLAAKNLSDAILLSDILRVNTEITKAPLSASMIKRYDEHHQDLTLLKALVRQQLPEKYKEIFFDQSKNGYAGYIDGGASQEEFYKFIKPILEKMDGTEELLVKLNREDLLRKQRTFDNGSIPHQIHLGELHAILRRQEDFYPFLKDNREKIEKILTFRIPYYVGPLARGNSRFAWMTRKSEETITPWNFEEVVDKGASAQSFIERMTNFDKNLPNEKVLPKHSLLYEYFTVYNELTKVKYVTEGMRKPAFLSGEQKKAIVDLLFKTNRKVTVKQLKEDYFKKIECFDSVEISGVEDRFNASLGTYHDLLKIIKDKDFLDNEENEDILEDIVLTLTLFEDREMIEERLKTYAHLFDDKVMKQLKRRRYTGWGRLSRKLINGIRDKQSGKTILDFLKSDGFANRNFMQLIHDDSLTFKEDIQKAQVSGQGDSLHEHIANLAGSPAIKKGILQTVKVVDELVKVMGRHKPENIVIEMARENQTTQKGQKNSRERMKRIEEGIKELGSQILKEHPVENTQLQNEKLYLYYLQNGRDMYVDQELDINRLSDYDVDHIVPQSFLKDDSIDNKVLTRSDKNRGKSDNVPSEEVVKKMKNYWRQLLNAKLITQRKFDNLTKAERGGLSELDKAGFIKRQLVETRQITKHVAQILDSRMNTKYDENDKLIREVKVITLKSKLVSDFRKDFQFYKVREINNYHHAHDAYLNAVVGTALIKKYPKLGSSGSETPGTSESATPESSGSEVEFSHEYWMRHALTLAKRARDEREVPVGAVLVLNNRVIGEGWNRAIGLHDPTAHAEIMALRQGGLVMQNYRLIDATLYVTFEPCVMCAGAMIHSRIGRVVFGVRNAKTGAAGSLMDVLHYPGMNHRVEITEGILADECAALLCYFFRMPRQESEFVYGDYKVYDVRKMIAKSEQEIGKATAKYFFYSNIMNFFKTEITLANGEIRKRPLIETNGETGEIVWDKGRDFATVRKVLSMPQVNIVKKTEVQTGGFSKESILPKRNSDKLIARKKDWDPKKYGGFDSPTVAYSVLVVAKVEKGKSKKLKSVKELLGITIMERSSFEKNPIDFLEAKGYKEVKKDLIIKLPKYSLFELENGRKRMLASAGELQKGNELALPSKYVNFLYLASHYEKLKGSPEDNEQKQLFVEQHKHYLDEIIEQISEFSKRVILADANLDKVLSAYNKHRDKPIREQAENIIHLFTLTNLGAPAAFKYFDTTIDRKRYTSTKEVLDATLIHQSITGLYETRIDLSQLGGD

SEQ ID NO: 288 - protein, 1541 aa, synthetic construct
  REGION 1..1541: note = 115.3 Cas9 TadAins 1006 polypeptide sequence
MDKKYSIGLAIGTNSVGWAVITDEYKVPSKKFKVLGNTDRHSIKKNLIGALLFDSGETAEATRLKRTARRRYTRRKNRICYLQEIFSNEMAKVDDSFFHRLEESFLVEEDKKHERHPIFGNIVDEVAYHEKYPTIYHLRKKLVDSTDKADLRLIYLALAHMIKFRGHFLIEGDLNPDNSDVDKLFIQLVQTYNQLFEENPINASGVDAKAILSARLSKSRRLENLIAQLPGEKKNGLFGNLIALSLGLTPNFKSNFDLAEDAKLQLSKDTYDDDLDNLLAQIGDQYADLFLAAKNLSDAILLSDILRVNTEITKAPLSASMIKRYDEHHQDLTLLKALVRQQLPEKYKEIFFDQSKNGYAGYIDGGASQEEFYKFIKPILEKMDGTEELLVKLNREDLLRKQRTFDNGSIPHQIHLGELHAILRRQEDFYPFLKDNREKIEKILTFRIPYYVGPLARGNSRFAWMTRKSEETITPWNFEEVVDKGASAQSFIERMTNFDKNLPNEKVLPKHSLLYEYFTVYNELTKVKYVTEGMRKPAFLSGEQKKAIVDLLFKTNRKVTVKQLKEDYFKKIECFDSVEISGVEDRFNASLGTYHDLLKIIKDKDFLDNEENEDILEDIVLTLTLFEDREMIEERLKTYAHLFDDKVMKQLKRRRYTGWGRLSRKLINGIRDKQSGKTILDFLKSDGFANRNFMQLIHDDSLTFKEDIQKAQVSGQGDSLHEHIANLAGSPAIKKGILQTVKVVDELVKVMGRHKPENIVIEMARENQTTQKGQKNSRERMKRIEEGIKELGSQILKEHPVENTQLQNEKLYLYYLQNGRDMYVDQELDINRLSDYDVDHIVPQSFLKDDSIDNKVLTRSDKNRGKSDNVPSEEVVKKMKNYWRQLLNAKLITQRKFDNLTKAERGGLSELDKAGFIKRQLVETRQITKHVAQILDSRMNTKYDENDKLIREVKVITLKSKLVSDFRKDFQFYKVREINNYHHAHDAYLNAVVGTALIKKYPKLEGSSGSETPGTSESATPESSGSEVEFSHEYWMRHALTLAKRARDEREVPVGAVLVLNNRVIGEGWNRAIGLHDPTAHAEIMALRQGGLVMQNYRLIDATLYVTFEPCVMCAGAMIHSRIGRVVFGVRNAKTGAAGSLMDVLHYPGMNHRVEITEGILADECAALLCYFFRMPRQSEFVYGDYKVYDVRKMIAKSEQEIGKATAKYFFYSNIMNFFKTEITLANGEIRKRPLIETNGETGEIVWDKGRDFATVRKVLSMPQVNIVKKTEVQTGGFSKESILPKRNSDKLIARKKDWDPKKYGGFDSPTVAYSVLVVAKVEKGKSKKLKSVKELLGITIMERSSFEKNPIDFLEAKGYKEVKKDLIIKLPKYSLFELENGRKRMLASAGELQKGNELALPSKYVNFLYLASHYEKLKGSPEDNEQKQLFVEQHKHYLDEIIEQISEFSKRVILADANLDKVLSAYNKHRDKPIREQAENIIHLFTLTNLGAPAAFKYFDTTIDRKRYTSTKEVLDATLIHQSITGLYETRIDLSQLGGD

SEQ ID NO: 289 - protein, 1541 aa, synthetic construct
  REGION 1..1541: note = 115.4 Cas9 TadAins 1007 polypeptide sequence
MDKKYSIGLAIGTNSVGWAVITDEYKVPSKKFKVLGNTDRHSIKKNLIGALLFDSGETAEATRLKRTARRRYTRRKNRICYLQEIFSNEMAKVDDSFFHRLEESFLVEEDKKHERHPIFGNIVDEVAYHEKYPTIYHLRKKLVDSTDKADLRLIYLALAHMIKFRGHFLIEGDLNPDNSDVDKLFIQLVQTYNQLFEENPINASGVDAKAILSARLSKSRRLENLIAQLPGEKKNGLFGNLIALSLGLTPNFKSNFDLAEDAKLQLSKDTYDDDLDNLLAQIGDQYADLFLAAKNLSDAILLSDILRVNTEITKAPLSASMIKRYDEHHQDLTLLKALVRQQLPEKYKEIFFDQSKNGYAGYIDGGASQEEFYKFIKPILEKMDGTEELLVKLNREDLLRKQRTFDNGSIPHQIHLGELHAILRRQEDFYPFLKDNREKIEKILTFRIPYYVGPLARGNSRFAWMTRKSEETITPWNFEEVVDKGASAQSFIERMTNFDKNLPNEKVLPKHSLLYEYFTVYNELTKVKYVTEGMRKPAFLSGEQKKAIVDLLFKTNRKVTVKQLKEDYFKKIECFDSVEISGVEDRFNASLGTYHDLLKIIKDKDFLDNEENEDILEDIVLTLTLFEDREMIEERLKTYAHLFDDKVMKQLKRRRYTGWGRLSRKLINGIRDKQSGKTILDFLKSDGFANRNFMQLIHDDSLTFKEDIQKAQVSGQGDSLHEHIANLAGSPAIKKGILQTVKVVDELVKVMGRHKPENIVIEMARENQTTQKGQKNSRERMKRIEEGIKELGSQILKEHPVENTQLQNEKLYLYYLQNGRDMYVDQELDINRLSDYDVDHIVPQSFLKDDSIDNKVLTRSDKNRGKSDNVPSEEVVKKMKNYWRQLLNAKLITQRKFDNLTKAERGGLSELDKAGFIKRQLVETRQITKHVAQILDSRMNTKYDENDKLIREVKVITLKSKLVSDFRKDFQFYKVREINNYHHAHDAYLNAVVGTALIKKYPKLESGSSGSETPGTSESATPESSGSEVEFSHEYWMRHALTLAKRARDEREVPVGAVLVLNNRVIGEGWNRAIGLHDPTAHAEIMALRQGGLVMQNYRLIDATLYVTFEPCVMCAGAMIHSRIGRVVFGVRNAKTGAAGSLMDVLHYPGMNHRVEITEGILADECAALLCYFFRMPRQEFVYGDYKVYDVRKMIAKSEQEIGKATAKYFFYSNIMNFFKTEITLANGEIRKRPLIETNGETGEIVWDKGRDFATVRKVLSMPQVNIVKKTEVQTGGFSKESILPKRNSDKLIARKKDWDPKKYGGFDSPTVAYSVLVVAKVEKGKSKKLKSVKELLGITIMERSSFEKNPIDFLEAKGYKEVKKDLIIKLPKYSLFELENGRKRMLASAGELQKGNELALPSKYVNFLYLASHYEKLKGSPEDNEQKQLFVEQHKHYLDEIIEQISEFSKRVILADANLDKVLSAYNKHRDKPIREQAENIIHLFTLTNLGAPAAFKYFDTTIDRKRYTSTKEVLDATLIHQSITGLYETRIDLSQLGGD

SEQ ID NO: 290 - protein, 1541 aa, synthetic construct
  REGION 1..1541: note = 116.1 Cas9 TadAins C-term truncate 792 polypeptide sequence
MDKKYSIGLAIGTNSVGWAVITDEYKVPSKKFKVLGNTDRHSIKKNLIGALLFDSGETAEATRLKRTARRRYTRRKNRICYLQEIFSNEMAKVDDSFFHRLEESFLVEEDKKHERHPIFGNIVDEVAYHEKYPTIYHLRKKLVDSTDKADLRLIYLALAHMIKFRGHFLIEGDLNPDNSDVDKLFIQLVQTYNQLFEENPINASGVDAKAILSARLSKSRRLENLIAQLPGEKKNGLFGNLIALSLGLTPNFKSNFDLAEDAKLQLSKDTYDDDLDNLLAQIGDQYADLFLAAKNLSDAILLSDILRVNTEITKAPLSASMIKRYDEHHQDLTLLKALVRQQLPEKYKEIFFDQSKNGYAGYIDGGASQEEFYKFIKPILEKMDGTEELLVKLNREDLLRKQRTFDNGSIPHQIHLGELHAILRRQEDFYPFLKDNREKIEKILTFRIPYYVGPLARGNSRFAWMTRKSEETITPWNFEEVVDKGASAQSFIERMTNFDKNLPNEKVLPKHSLLYEYFTVYNELTKVKYVTEGMRKPAFLSGEQKKAIVDLLFKTNRKVTVKQLKEDYFKKIECFDSVEISGVEDRFNASLGTYHDLLKIIKDKDFLDNEENEDILEDIVLTLTLFEDREMIEERLKTYAHLFDDKVMKQLKRRRYTGWGRLSRKLINGIRDKQSGKTILDFLKSDGFANRNFMQLIHDDSLTFKEDIQKAQVSGQGDSLHEHIANLAGSPAIKKGILQTVKVVDELVKVMGRHKPENIVIEMARENQTTQKGQKNSRERMKRIEEGIKELGGSSGSETPGTSESATPESSGSEVEFSHEYWMRHALTLAKRARDEREVPVGAVLVLNNRVIGEGWNRAIGLHDPTAHAEIMALRQGGLVMQNYRLIDATLYVTFEPCVMCAGAMIHSRIGRVVFGVRNAKTGAAGSLMDVLHYPGMNHRVEITEGILADECAALLCYFFRMPRQSQILKEHPVENTQLQNEKLYLYYLQNGRDMYVDQELDINRLSDYDVDHIVPQSFLKDDSIDNKVLTRSDKNRGKSDNVPSEEVVKKMKNYWRQLLNAKLITQRKFDNLTKAERGGLSELDKAGFIKRQLVETRQITKHVAQILDSRMNTKYDENDKLIREVKVITLKSKLVSDFRKDFQFYKVREINNYHHAHDAYLNAVVGTALIKKYPKLESEFVYGDYKVYDVRKMIAKSEQEIGKATAKYFFYSNIMNFFKTEITLANGEIRKRPLIETNGETGEIVWDKGRDFATVRKVLSMPQVNIVKKTEVQTGGFSKESILPKRNSDKLIARKKDWDPKKYGGFDSPTVAYSVLVVAKVEKGKSKKLKSVKELLGITIMERSSFEKNPIDFLEAKGYKEVKKDLIIKLPKYSLFELENGRKRMLASAGELQKGNELALPSKYVNFLYLASHYEKLKGSPEDNEQKQLFVEQHKHYLDEIIEQISEFSKRVILADANLDKVLSAYNKHRDKPIREQAENIIHLFTLTNLGAPAAFKYFDTTIDRKRYTSTKEVLDATLIHQSITGLYETRIDLSQLGGD

SEQ ID NO: 291 - protein, 1541 aa, synthetic construct
  REGION 1..1541: note = 116.2 Cas9 TadAins C-term truncate 791 polypeptide sequence
MDKKYSIGLAIGTNSVGWAVITDEYKVPSKKFKVLGNTDRHSIKKNLIGALLFDSGETAEATRLKRTARRRYTRRKNRICYLQEIFSNEMAKVDDSFFHRLEESFLVEEDKKHERHPIFGNIVDEVAYHEKYPTIYHLRKKLVDSTDKADLRLIYLALAHMIKFRGHFLIEGDLNPDNSDVDKLFIQLVQTYNQLFEENPINASGVDAKAILSARLSKSRRLENLIAQLPGEKKNGLFGNLIALSLGLTPNFKSNFDLAEDAKLQLSKDTYDDDLDNLLAQIGDQYADLFLAAKNLSDAILLSDILRVNTEITKAPLSASMIKRYDEHHQDLTLLKALVRQQLPEKYKEIFFDQSKNGYAGYIDGGASQEEFYKFIKPILEKMDGTEELLVKLNREDLLRKQRTFDNGSIPHQIHLGELHAILRRQEDFYPFLKDNREKIEKILTFRIPYYVGPLARGNSRFAWMTRKSEETITPWNFEEVVDKGASAQSFIERMTNFDKNLPNEKVLPKHSLLYEYFTVYNELTKVKYVTEGMRKPAFLSGEQKKAIVDLLFKTNRKVTVKQLKEDYFKKIECFDSVEISGVEDRFNASLGTYHDLLKIIKDKDFLDNEENEDILEDIVLTLTLFEDREMIEERLKTYAHLFDDKVMKQLKRRRYTGWGRLSRKLINGIRDKQSGKTILDFLKSDGFANRNFMQLIHDDSLTFKEDIQKAQVSGQGDSLHEHIANLAGSPAIKKGILQTVKVVDELVKVMGRHKPENIVIEMARENQTTQKGQKNSRERMKRIEEGIKELGSSGSETPGTSESATPESSGSEVEFSHEYWMRHALTLAKRARDEREVPVGAVLVLNNRVIGEGWNRAIGLHDPTAHAEIMALRQGGLVMQNYRLIDATLYVTFEPCVMCAGAMIHSRIGRVVFGVRNAKTGAAGSLMDVLHYPGMNHRVEITEGILADECAALLCYFFRMPRQGSQILKEHPVENTQLQNEKLYLYYLQNGRDMYVDQELDINRLSDYDVDHIVPQSFLKDDSIDNKVLTRSDKNRGKSDNVPSEEVVKKMKNYWRQLLNAKLITQRKFDNLTKAERGGLSELDKAGFIKRQLVETRQITKHVAQILDSRMNTKYDENDKLIREVKVITLKSKLVSDFRKDFQFYKVREINNYHHAHDAYLNAVVGTALIKKYPKLESEFVYGDYKVYDVRKMIAKSEQEIGKATAKYFFYSNIMNFFKTEITLANGEIRKRPLIETNGETGEIVWDKGRDFATVRKVLSMPQVNIVKKTEVQTGGFSKESILPKRNSDKLIARKKDWDPKKYGGFDSPTVAYSVLVVAKVEKGKSKKLKSVKELLGITIMERSSFEKNPIDFLEAKGYKEVKKDLIIKLPKYSLFELENGRKRMLASAGELQKGNELALPSKYVNFLYLASHYEKLKGSPEDNEQKQLFVEQHKHYLDEIIEQISEFSKRVILADANLDKVLSAYNKHRDKPIREQAENIIHLFTLTNLGAPAAFKYFDTTIDRKRYTSTKEVLDATLIHQSITGLYETRIDLSQLGGD

SEQ ID NO: 292 - protein, 1541 aa, synthetic construct
  REGION 1..1541: note = 116.3 Cas9 TadAins C-term truncate 790 polypeptide sequence
MDKKYSIGLAIGTNSVGWAVITDEYKVPSKKFKVLGNTDRHSIKKNLIGALLFDSGETAEATRLKRTARRRYTRRKNRICYLQEIFSNEMAKVDDSFFHRLEESFLVEEDKKHERHPIFGNIVDEVAYHEKYPTIYHLRKKLVDSTDKADLRLIYLALAHMIKFRGHFLIEGDLNPDNSDVDKLFIQLVQTYNQLFEENPINASGVDAKAILSARLSKSRRLENLIAQLPGEKKNGLFGNLIALSLGLTPNFKSNFDLAEDAKLQLSKDTYDDDLDNLLAQIGDQYADLFLAAKNLSDAILLSDILRVNTEITKAPLSASMIKRYDEHHQDLTLLKALVRQQLPEKYKEIFFDQSKNGYAGYIDGGASQEEFYKFIKPILEKMDGTEELLVKLNREDLLRKQRTFDNGSIPHQIHLGELHAILRRQEDFYPFLKDNREKIEKILTFRIPYYVGPLARGNSRFAWMTRKSEETITPWNFEEVVDKGASAQSFIERMTNFDKNLPNEKVLPKHSLLYEYFTVYNELTKVKYVTEGMRKPAFLSGEQKKAIVDLLFKTNRKVTVKQLKEDYFKKIECFDSVEISGVEDRFNASLGTYHDLLKIIKDKDFLDNEENEDILEDIVLTLTLFEDREMIEERLKTYAHLFDDKVMKQLKRRRYTGWGRLSRKLINGIRDKQSGKTILDFLKSDGFANRNFMQLIHDDSLTFKEDIQKAQVSGQGDSLHEHIANLAGSPAIKKGILQTVKVVDELVKVMGRHKPENIVIEMARENQTTQKGQKNSRERMKRIEEGIKEGSSGSETPGTSESATPESSGSEVEFSHEYWMRHALTLAKRARDEREVPVGAVLVLNNRVIGEGWNRAIGLHDPTAHAEIMALRQGGLVMQNYRLIDATLYVTFEPCVMCAGAMIHSRIGRVVFGVRNAKTGAAGSLMDVLHYPGMNHRVEITEGILADECAALLCYFFRMPRQLGSQILKEHPVENTQLQNEKLYLYYLQNGRDMYVDQELDINRLSDYDVDHIVPQSFLKDDSIDNKVLTRSDKNRGKSDNVPSEEVVKKMKNYWRQLLNAKLITQRKFDNLTKAERGGLSELDKAGFIKRQLVETRQITKHVAQILDSRMNTKYDENDKLIREVKVITLKSKLVSDFRKDFQFYKVREINNYHHAHDAYLNAVVGTALIKKYPKLESEFVYGDYKVYDVRKMIAKSEQEIGKATAKYFFYSNIMNFFKTEITLANGEIRKRPLIETNGETGEIVWDKGRDFATVRKVLSMPQVNIVKKTEVQTGGFSKESILPKRNSDKLIARKKDWDPKKYGGFDSPTVAYSVLVVAKVEKGKSKKLKSVKELLGITIMERSSFEKNPIDFLEAKGYKEVKKDLIIKLPKYSLFELENGRKRMLASAGELQKGNELALPSKYVNFLYLASHYEKLKGSPEDNEQKQLFVEQHKHYLDEIIEQISEFSKRVILADANLDKVLSAYNKHRDKPIREQAENIIHLFTLTNLGAPAAFKYFDTTIDRKRYTSTKEVLDATLIHQSITGLYETRIDLSQLGGD

SEQ ID NO: 293 - protein, 1484 aa, synthetic construct
  REGION 1..1484: note = 117 Cas9 delta 1017-1069 polypeptide sequence
MDKKYSIGLAIGTNSVGWAVITDEYKVPSKKFKVLGNTDRHSIKKNLIGALLFDSGETAEATRLKRTARRRYTRRKNRICYLQEIFSNEMAKVDDSFFHRLEESFLVEEDKKHERHPIFGNIVDEVAYHEKYPTIYHLRKKLVDSTDKADLRLIYLALAHMIKFRGHFLIEGDLNPDNSDVDKLFIQLVQTYNQLFEENPINASGVDAKAILSARLSKSRRLENLIAQLPGEKKNGLFGNLIALSLGLTPNFKSNFDLAEDAKLQLSKDTYDDDLDNLLAQIGDQYADLFLAAKNLSDAILLSDILRVNTEITKAPLSASMIKRYDEHHQDLTLLKALVRQQLPEKYKEIFFDQSKNGYAGYIDGGASQEEFYKFIKPILEKMDGTEELLVKLNREDLLRKQRTFDNGSIPHQIHLGELHAILRRQEDFYPFLKDNREKIEKILTFRIPYYVGPLARGNSRFAWMTRKSEETITPWNFEEVVDKGASAQSFIERMTNFDKNLPNEKVLPKHSLLYEYFTVYNELTKVKYVTEGMRKPAFLSGEQKKAIVDLLFKTNRKVTVKQLKEDYFKKIECFDSVEISGVEDRFNASLGTYHDLLKIIKDKDFLDNEENEDILEDIVLTLTLFEDREMIEERLKTYAHLFDDKVMKQLKRRRYTGWGRLSRKLINGIRDKQSGKTILDFLKSDGFANRNFMQLIHDDSLTFKEDIQKAQVSGQGDSLHEHIANLAGSPAIKKGILQTVKVVDELVKVMGRHKPENIVIEMARENQTTQKGQKNSRERMKRIEEGIKELGSQILKEHPVENTQLQNEKLYLYYLQNGRDMYVDQELDINRLSDYDVDHIVPQSFLKDDSIDNKVLTRSDKNRGKSDNVPSEEVVKKMKNYWRQLLNAKLITQRKFDNLTKAERGGLSELDKAGFIKRQLVETRQITKHVAQILDSRMNTKYDENDKLIREVKVITLKSKLVSDFRKDFQFYKVREINNYHHAHDAYLNAVVGTALIKKYPKLESEFVYGDYKVYSSGSEVEFSHEYWMRHALTLAKRARDEREVPVGAVLVLNNRVIGEGWNRAIGLHDPTAHAEIMALRQGGLVMQNYRLIDATLYVTFEPCVMCAGAMIHSRIGRVVFGVRNAKTGAAGSLMDVLHYPGMNHRVEITEGILADECAALLCYFFRMPRQVFNAQKKAQSSTDGEIVWDKGRDFATVRKVLSMPQVNIVKKTEVQTGGFSKESILPKRNSDKLIARKKDWDPKKYGGFDSPTVAYSVLVVAKVEKGKSKKLKSVKELLGITIMERSSFEKNPIDFLEAKGYKEVKKDLIIKLPKYSLFELENGRKRMLASAGELQKGNELALPSKYVNFLYLASHYEKLKGSPEDNEQKQLFVEQHKHYLDEIIEQISEFSKRVILADANLDKVLSAYNKHRDKPIREQAENIIHLFTLTNLGAPAAFKYFDTTIDRKRYTSTKEVLDATLIHQSITGLYETRIDLSQLGGD

SEQ ID NO: 294 - protein, 1554 aa, synthetic construct
  REGION 1..1554: note = 118 Cas9 TadA-CP116ins 1067 polypeptide sequence
MDKKYSIGLAIGTNSVGWAVITDEYKVPSKKFKVLGNTDRHSIKKNLIGALLFDSGETAEATRLKRTARRRYTRRKNRICYLQEIFSNEMAKVDDSFFHRLEESFLVEEDKKHERHPIFGNIVDEVAYHEKYPTIYHLRKKLVDSTDKADLRLIYLALAHMIKFRGHFLIEGDLNPDNSDVDKLFIQLVQTYNQLFEENPINASGVDAKAILSARLSKSRRLENLIAQLPGEKKNGLFGNLIALSLGLTPNFKSNFDLAEDAKLQLSKDTYDDDLDNLLAQIGDQYADLFLAAKNLSDAILLSDILRVNTEITKAPLSASMIKRYDEHHQDLTLLKALVRQQLPEKYKEIFFDQSKNGYAGYIDGGASQEEFYKFIKPILEKMDGTEELLVKLNREDLLRKQRTFDNGSIPHQIHLGELHAILRRQEDFYPFLKDNREKIEKILTFRIPYYVGPLARGNSRFAWMTRKSEETITPWNFEEVVDKGASAQSFIERMTNFDKNLPNEKVLPKHSLLYEYFTVYNELTKVKYVTEGMRKPAFLSGEQKKAIVDLLFKTNRKVTVKQLKEDYFKKIECFDSVEISGVEDRFNASLGTYHDLLKIIKDKDFLDNEENEDILEDIVLTLTLFEDREMIEERLKTYAHLFDDKVMKQLKRRRYTGWGRLSRKLINGIRDKQSGKTILDFLKSDGFANRNFMQLIHDDSLTFKEDIQKAQVSGQGDSLHEHIANLAGSPAIKKGILQTVKVVDELVKVMGRHKPENIVIEMARENQTTQKGQKNSRERMKRIEEGIKELGSQILKEHPVENTQLQNEKLYLYYLQNGRDMYVDQELDINRLSDYDVDHIVPQSFLKDDSIDNKVLTRSDKNRGKSDNVPSEEVVKKMKNYWRQLLNAKLITQRKFDNLTKAERGGLSELDKAGFIKRQLVETRQITKHVAQILDSRMNTKYDENDKLIREVKVITLKSKLVSDFRKDFQFYKVREINNYHHAHDAYLNAVVGTALIKKYPKLESEFVYGDYKVYDVRKMIAKSEQEIGKATAKYFFYSNIMNFFKTEITLANGEIRKRPLIETNMNHRVEITEGILADECAALLCYFFRMPRQVFNAQKKAQSSTDGSSGSETPGTSESATPESSGSEVEFSHEYWMRHALTLAKRARDEREVPVGAVLVLNNRVIGEGWNRAIGLHDPTAHAEIMALRQGGLVMQNYRLIDATLYVTFEPCVMCAGAMIHSRIGRVVFGVRNAKTGAAGSLMDVLHYPGGETGEIVWDKGRDFATVRKVLSMPQVNIVKKTEVQTGGFSKESILPKRNSDKLIARKKDWDPKKYGGFDSPTVAYSVLVVAKVEKGKSKKLKSVKELLGITIMERSSFEKNPIDFLEAKGYKEVKKDLIIKLPKYSLFELENGRKRMLASAGELQKGNELALPSKYVNFLYLASHYEKLKGSPEDNEQKQLFVEQHKHYLDEIIEQISEFSKRVILADANLDKVLSAYNKHRDKPIREQAENIIHLFTLTNLGAPAAFKYFDTTIDRKRYTSTKEVLDATLIHQSITGLYETRIDLSQLGGD

SEQ ID NO: 295 - protein, 1554 aa, synthetic construct
  REGION 1..1554: note = 119 Cas9 TadAins 701 polypeptide sequence
MDKKYSIGLAIGTNSVGWAVITDEYKVPSKKFKVLGNTDRHSIKKNLIGALLFDSGETAEATRLKRTARRRYTRRKNRICYLQEIFSNEMAKVDDSFFHRLEESFLVEEDKKHERHPIFGNIVDEVAYHEKYPTIYHLRKKLVDSTDKADLRLIYLALAHMIKFRGHFLIEGDLNPDNSDVDKLFIQLVQTYNQLFEENPINASGVDAKAILSARLSKSRRLENLIAQLPGEKKNGLFGNLIALSLGLTPNFKSNFDLAEDAKLQLSKDTYDDDLDNLLAQIGDQYADLFLAAKNLSDAILLSDILRVNTEITKAPLSASMIKRYDEHHQDLTLLKALVRQQLPEKYKEIFFDQSKNGYAGYIDGGASQEEFYKFIKPILEKMDGTEELLVKLNREDLLRKQRTFDNGSIPHQIHLGELHAILRRQEDFYPFLKDNREKIEKILTFRIPYYVGPLARGNSRFAWMTRKSEETITPWNFEEVVDKGASAQSFIERMTNFDKNLPNEKVLPKHSLLYEYFTVYNELTKVKYVTEGMRKPAFLSGEQKKAIVDLLFKTNRKVTVKQLKEDYFKKIECFDSVEISGVEDRFNASLGTYHDLLKIIKDKDFLDNEENEDILEDIVLTLTLFEDREMIEERLKTYAHLFDDKVMKQLKRRRYTGWGRLSRKLINGIRDKQSGKTILDFLKSDGFANRNFMQLIHDDSGSSGSETPGTSESATPESSGSEVEFSHEYWMRHALTLAKRARDEREVPVGAVLVLNNRVIGEGWNRAIGLHDPTAHAEIMALRQGGLVMQNYRLIDATLYVTFEPCVMCAGAMIHSRIGRVVFGVRNAKTGAAGSLMDVLHYPGMNHRVEITEGILADECAALLCYFFRMPRQVFNAQKKAQSSTDLTFKEDIQKAQVSGQGDSLHEHIANLAGSPAIKKGILQTVKVVDELVKVMGRHKPENIVIEMARENQTTQKGQKNSRERMKRIEEGIKELGSQILKEHPVENTQLQNEKLYLYYLQNGRDMYVDQELDINRLSDYDVDHIVPQSFLKDDSIDNKVLTRSDKNRGKSDNVPSEEVVKKMKNYWRQLLNAKLITQRKFDNLTKAERGGLSELDKAGFIKRQLVETRQITKHVAQILDSRMNTKYDENDKLIREVKVITLKSKLVSDFRKDFQFYKVREINNYHHAHDAYLNAVVGTALIKKYPKLESEFVYGDYKVYDVRKMIAKSEQEIGKATAKYFFYSNIMNFFKTEITLANGEIRKRPLIETNGETGEIVWDKGRDFATVRKVLSMPQVNIVKKTEVQTGGFSKESILPKRNSDKLIARKKDWDPKKYGGFDSPTVAYSVLVVAKVEKGKSKKLKSVKELLGITIMERSSFEKNPIDFLEAKGYKEVKKDLIIKLPKYSLFELENGRKRMLASAGELQKGNELALPSKYVNFLYLASHYEKLKGSPEDNEQKQLFVEQHKHYLDEIIEQISEFSKRVILADANLDKVLSAYNKHRDKPIREQAENIIHLFTLTNLGAPAAFKYFDTTIDRKRYTSTKEVLDATLIHQSITGLYETRIDLSQLGGD

SEQ ID NO: 296 - protein, 1554 aa, synthetic construct
  REGION 1..1554: note = 120 Cas9 TadACP136ins 1248 polypeptide sequence
MDKKYSIGLAIGTNSVGWAVITDEYKVPSKKFKVLGNTDRHSIKKNLIGALLFDSGETAEATRLKRTARRRYTRRKNRICYLQEIFSNEMAKVDDSFFHRLEESFLVEEDKKHERHPIFGNIVDEVAYHEKYPTIYHLRKKLVDSTDKADLRLIYLALAHMIKFRGHFLIEGDLNPDNSDVDKLFIQLVQTYNQLFEENPINASGVDAKAILSARLSKSRRLENLIAQLPGEKKNGLFGNLIALSLGLTPNFKSNFDLAEDAKLQLSKDTYDDDLDNLLAQIGDQYADLFLAAKNLSDAILLSDILRVNTEITKAPLSASMIKRYDEHHQDLTLLKALVRQQLPEKYKEIFFDQSKNGYAGYIDGGASQEEFYKFIKPILEKMDGTEELLVKLNREDLLRKQRTFDNGSIPHQIHLGELHAILRRQEDFYPFLKDNREKIEKILTFRIPYYVGPLARGNSRFAWMTRKSEETITPWNFEEVVDKGASAQSFIERMTNFDKNLPNEKVLPKHSLLYEYFTVYNELTKVKYVTEGMRKPAFLSGEQKKAIVDLLFKTNRKVTVKQLKEDYFKKIECFDSVEISGVEDRFNASLGTYHDLLKIIKDKDFLDNEENEDILEDIVLTLTLFEDREMIEERLKTYAHLFDDKVMKQLKRRRYTGWGRLSRKLINGIRDKQSGKTILDFLKSDGFANRNFMQLIHDDSLTFKEDIQKAQVSGQGDSLHEHIANLAGSPAIKKGILQTVKVVDELVKVMGRHKPENIVIEMARENQTTQKGQKNSRERMKRIEEGIKELGSQILKEHPVENTQLQNEKLYLYYLQNGRDMYVDQELDINRLSDYDVDHIVPQSFLKDDSIDNKVLTRSDKNRGKSDNVPSEEVVKKMKNYWRQLLNAKLITQRKFDNLTKAERGGLSELDKAGFIKRQLVETRQITKHVAQILDSRMNTKYDENDKLIREVKVITLKSKLVSDFRKDFQFYKVREINNYHHAHDAYLNAVVGTALIKKYPKLESEFVYGDYKVYDVRKMIAKSEQEIGKATAKYFFYSNIMNFFKTEITLANGEIRKRPLIETNGETGEIVWDKGRDFATVRKVLSMPQVNIVKKTEVQTGGFSKESILPKRNSDKLIARKKDWDPKKYGGFDSPTVAYSVLVVAKVEKGKSKKLKSVKELLGITIMERSSFEKNPIDFLEAKGYKEVKKDLIIKLPKYSLFELENGRKRMLASAGELQKGNELALPSKYVNFLYLASHYEKLKGSMNHRVEITEGILADECAALLCYFFRMPRQVFNAQKKAQSSTDGSSGSETPGTSESATPESSGSEVEFSHEYWMRHALTLAKRARDEREVPVGAVLVLNNRVIGEGWNRAIGLHDPTAHAEIMALRQGGLVMQNYRLIDATLYVTFEPCVMCAGAMIHSRIGRVVFGVRNAKTGAAGSLMDVLHYPGPEDNEQKQLFVEQHKHYLDEIIEQISEFSKRVILADANLDKVLSAYNKHRDKPIREQAENIIHLFTLTNLGAPAAFKYFDTTIDRKRYTSTKEVLDATLIHQSITGLYETRIDLSQLGGD

SEQ ID NO: 297 - protein, 1554 aa, synthetic construct
  REGION 1..1554: note = 121 Cas9 TadACP136ins 1052 polypeptide sequence
MDKKYSIGLAIGTNSVGWAVITDEYKVPSKKFKVLGNTDRHSIKKNLIGALLFDSGETAEATRLKRTARRRYTRRKNRICYLQEIFSNEMAKVDDSFFHRLEESFLVEEDKKHERHPIFGNIVDEVAYHEKYPTIYHLRKKLVDSTDKADLRLIYLALAHMIKFRGHFLIEGDLNPDNSDVDKLFIQLVQTYNQLFEENPINASGVDAKAILSARLSKSRRLENLIAQLPGEKKNGLFGNLIALSLGLTPNFKSNFDLAEDAKLQLSKDTYDDDLDNLLAQIGDQYADLFLAAKNLSDAILLSDILRVNTEITKAPLSASMIKRYDEHHQDLTLLKALVRQQLPEKYKEIFFDQSKNGYAGYIDGGASQEEFYKFIKPILEKMDGTEELLVKLNREDLLRKQRTFDNGSIPHQIHLGELHAILRRQEDFYPFLKDNREKIEKILTFRIPYYVGPLARGNSRFAWMTRKSEETITPWNFEEVVDKGASAQSFIERMTNFDKNLPNEKVLPKHSLLYEYFTVYNELTKVKYVTEGMRKPAFLSGEQKKAIVDLLFKTNRKVTVKQLKEDYFKKIECFDSVEISGVEDRFNASLGTYHDLLKIIKDKDFLDNEENEDILEDIVLTLTLFEDREMIEERLKTYAHLFDDKVMKQLKRRRYTGWGRLSRKLINGIRDKQSGKTILDFLKSDGFANRNFMQLIHDDSLTFKEDIQKAQVSGQGDSLHEHIANLAGSPAIKKGILQTVKVVDELVKVMGRHKPENIVIEMARENQTTQKGQKNSRERMKRIEEGIKELGSQILKEHPVENTQLQNEKLYLYYLQNGRDMYVDQELDINRLSDYDVDHIVPQSFLKDDSIDNKVLTRSDKNRGKSDNVPSEEVVKKMKNYWRQLLNAKLITQRKFDNLTKAERGGLSELDKAGFIKRQLVETRQITKHVAQILDSRMNTKYDENDKLIREVKVITLKSKLVSDFRKDFQFYKVREINNYHHAHDAYLNAVVGTALIKKYPKLESEFVYGDYKVYDVRKMIAKSEQEIGKATAKYFFYSNIMNFFKTEITLAMNHRVEITEGILADECAALLCYFFRMPRQVFNAQKKAQSSTDGSSGSETPGTSESATPESSGSEVEFSHEYWMRHALTLAKRARDEREVPVGAVLVLNNRVIGEGWNRAIGLHDPTAHAEIMALRQGGLVMQNYRLIDATLYVTFEPCVMCAGAMIHSRIGRVVFGVRNAKTGAAGSLMDVLHYPGNGEIRKRPLIETNGETGEIVWDKGRDFATVRKVLSMPQVNIVKKTEVQTGGFSKESILPKRNSDKLIARKKDWDPKKYGGFDSPTVAYSVLVVAKVEKGKSKKLKSVKELLGITIMERSSFEKNPIDFLEAKGYKEVKKDLIIKLPKYSLFELENGRKRMLASAGELQKGNELALPSKYVNFLYLASHYEKLKGSPEDNEQKQLFVEQHKHYLDEIIEQISEFSKRVILADANLDKVLSAYNKHRDKPIREQAENIIHLFTLTNLGAPAAFKYFDTTIDRKRYTSTKEVLDATLIHQSITGLYETRIDLSQLGGD

SEQ ID NO: 298 - protein, 1554 aa, synthetic construct
  REGION 1..1554: note = 122 Cas9 TadACP136ins 1041 polypeptide sequence
MDKKYSIGLAIGTNSVGWAVITDEYKVPSKKFKVLGNTDRHSIKKNLIGALLFDSGETAEATRLKRTARRRYTRRKNRICYLQEIFSNEMAKVDDSFFHRLEESFLVEEDKKHERHPIFGNIVDEVAYHEKYPTIYHLRKKLVDSTDKADLRLIYLALAHMIKFRGHFLIEGDLNPDNSDVDKLFIQLVQTYNQLFEENPINASGVDAKAILSARLSKSRRLENLIAQLPGEKKNGLFGNLIALSLGLTPNFKSNFDLAEDAKLQLSKDTYDDDLDNLLAQIGDQYADLFLAAKNLSDAILLSDILRVNTEITKAPLSASMIKRYDEHHQDLTLLKALVRQQLPEKYKEIFFDQSKNGYAGYIDGGASQEEFYKFIKPILEKMDGTEELLVKLNREDLLRKQRTFDNGSIPHQIHLGELHAILRRQEDFYPFLKDNREKIEKILTFRIPYYVGPLARGNSRFAWMTRKSEETITPWNFEEVVDKGASAQSFIERMTNFDKNLPNEKVLPKHSLLYEYFTVYNELTKVKYVTEGMRKPAFLSGEQKKAIVDLLFKTNRKVTVKQLKEDYFKKIECFDSVEISGVEDRFNASLGTYHDLLKIIKDKDFLDNEENEDILEDIVLTLTLFEDREMIEERLKTYAHLFDDKVMKQLKRRRYTGWGRLSRKLINGIRDKQSGKTILDFLKSDGFANRNFMQLIHDDSLTFKEDIQKAQVSGQGDSLHEHIANLAGSPAIKKGILQTVKVVDELVKVMGRHKPENIVIEMARENQTTQKGQKNSRERMKRIEEGIKELGSQILKEHPVENTQLQNEKLYLYYLQNGRDMYVDQELDINRLSDYDVDHIVPQSFLKDDSIDNKVLTRSDKNRGKSDNVPSEEVVKKMKNYWRQLLNAKLITQRKFDNLTKAERGGLSELDKAGFIKRQLVETRQITKHVAQILDSRMNTKYDENDKLIREVKVITLKSKLVSDFRKDFQFYKVREINNYHHAHDAYLNAVVGTALIKKYPKLESEFVYGDYKVYDVRKMIAKSEQEIGKATAKYFFYSMNHRVEITEGILADECAALLCYFFRMPRQVFNAQKKAQSSTDGSSGSETPGTSESATPESSGSEVEFSHEYWMRHALTLAKRARDEREVPVGAVLVLNNRVIGEGWNRAIGLHDPTAHAEIMALRQGGLVMQNYRLIDATLYVTFEPCVMCAGAMIHSRIGRVVFGVRNAKTGAAGSLMDVLHYPGNIMNFFKTEITLANGEIRKRPLIETNGETGEIVWDKGRDFATVRKVLSMPQVNIVKKTEVQTGGFSKESILPKRNSDKLIARKKDWDPKKYGGFDSPTVAYSVLVVAKVEKGKSKKLKSVKELLGITIMERSSFEKNPIDFLEAKGYKEVKKDLIIKLPKYSLFELENGRKRMLASAGELQKGNELALPSKYVNFLYLASHYEKLKGSPEDNEQKQLFVEQHKHYLDEIIEQISEFSKRVILADANLDKVLSAYNKHRDKPIREQAENIIHLFTLTNLGAPAAFKYFDTTIDRKRYTSTKEVLDATLIHQSITGLYETRIDLSQLGGD

SEQ ID NO: 299 - protein, 1554 aa, synthetic construct
  REGION 1..1554: note = 123 Cas9 TadACP139ins 1299 polypeptide sequence
MDKKYSIGLAIGTNSVGWAVITDEYKVPSKKFKVLGNTDRHSIKKNLIGALLFDSGETAEATRLKRTARRRYTRRKNRICYLQEIFSNEMAKVDDSFFHRLEESFLVEEDKKHERHPIFGNIVDEVAYHEKYPTIYHLRKKLVDSTDKADLRLIYLALAHMIKFRGHFLIEGDLNPDNSDVDKLFIQLVQTYNQLFEENPINASGVDAKAILSARLSKSRRLENLIAQLPGEKKNGLFGNLIALSLGLTPNFKSNFDLAEDAKLQLSKDTYDDDLDNLLAQIGDQYADLFLAAKNLSDAILLSDILRVNTEITKAPLSASMIKRYDEHHQDLTLLKALVRQQLPEKYKEIFFDQSKNGYAGYIDGGASQEEFYKFIKPILEKMDGTEELLVKLNREDLLRKQRTFDNGSIPHQIHLGELHAILRRQEDFYPFLKDNREKIEKILTFRIPYYVGPLARGNSRFAWMTRKSEETITPWNFEEVVDKGASAQSFIERMTNFDKNLPNEKVLPKHSLLYEYFTVYNELTKVKYVTEGMRKPAFLSGEQKKAIVDLLFKTNRKVTVKQLKEDYFKKIECFDSVEISGVEDRFNASLGTYHDLLKIIKDKDFLDNEENEDILEDIVLTLTLFEDREMIEERLKTYAHLFDDKVMKQLKRRRYTGWGRLSRKLINGIRDKQSGKTILDFLKSDGFANRNFMQLIHDDSLTFKEDIQKAQVSGQGDSLHEHIANLAGSPAIKKGILQTVKVVDELVKVMGRHKPENIVIEMARENQTTQKGQKNSRERMKRIEEGIKELGSQILKEHPVENTQLQNEKLYLYYLQNGRDMYVDQELDINRLSDYDVDHIVPQSFLKDDSIDNKVLTRSDKNRGKSDNVPSEEVVKKMKNYWRQLLNAKLITQRKFDNLTKAERGGLSELDKAGFIKRQLVETRQITKHVAQILDSRMNTKYDENDKLIREVKVITLKSKLVSDFRKDFQFYKVREINNYHHAHDAYLNAVVGTALIKKYPKLESEFVYGDYKVYDVRKMIAKSEQEIGKATAKYFFYSNIMNFFKTEITLANGEIRKRPLIETNGETGEIVWDKGRDFATVRKVLSMPQVNIVKKTEVQTGGFSKESILPKRNSDKLIARKKDWDPKKYGGFDSPTVAYSVLVVAKVEKGKSKKLKSVKELLGITIMERSSFEKNPIDFLEAKGYKEVKKDLIIKLPKYSLFELENGRKRMLASAGELQKGNELALPSKYVNFLYLASHYEKLKGSPEDNEQKQLFVEQHKHYLDEIIEQISEFSKRVILADANLDKVLSAYNKHRMNHRVEITEGILADECAALLCYFFRMPRQVFNAQKKAQSSTDGSSGSETPGTSESATPESSGSEVEFSHEYWMRHALTLAKRARDEREVPVGAVLVLNNRVIGEGWNRAIGLHDPTAHAEIMALRQGGLVMQNYRLIDATLYVTFEPCVMCAGAMIHSRIGRVVFGVRNAKTGAAGSLMDVLHYPGDKPIREQAENIIHLFTLTNLGAPAAFKYFDTTIDRKRYTSTKEVLDATLIHQSITGLYETRIDLSQLGGD

SEQ ID NO: 300 - protein, 1454 aa, synthetic construct
  REGION 1..1454: note = 124 Cas9 delta 792-872TadAins polypeptide sequence
MDKKYSIGLAIGTNSVGWAVITDEYKVPSKKFKVLGNTDRHSIKKNLIGALLFDSGETAEATRLKRTARRRYTRRKNRICYLQEIFSNEMAKVDDSFFHRLEESFLVEEDKKHERHPIFGNIVDEVAYHEKYPTIYHLRKKLVDSTDKADLRLIYLALAHMIKFRGHFLIEGDLNPDNSDVDKLFIQLVQTYNQLFEENPINASGVDAKAILSARLSKSRRLENLIAQLPGEKKNGLFGNLIALSLGLTPNFKSNFDLAEDAKLQLSKDTYDDDLDNLLAQIGDQYADLFLAAKNLSDAILLSDILRVNTEITKAPLSASMIKRYDEHHQDLTLLKALVRQQLPEKYKEIFFDQSKNGYAGYIDGGASQEEFYKFIKPILEKMDGTEELLVKLNREDLLRKQRTFDNGSIPHQIHLGELHAILRRQEDFYPFLKDNREKIEKILTFRIPYYVGPLARGNSRFAWMTRKSEETITPWNFEEVVDKGASAQSFIERMTNFDKNLPNEKVLPKHSLLYEYFTVYNELTKVKYVTEGMRKPAFLSGEQKKAIVDLLFKTNRKVTVKQLKEDYFKKIECFDSVEISGVEDRFNASLGTYHDLLKIIKDKDFLDNEENEDILEDIVLTLTLFEDREMIEERLKTYAHLFDDKVMKQLKRRRYTGWGRLSRKLINGIRDKQSGKTILDFLKSDGFANRNFMQLIHDDSLTFKEDIQKAQVSGQGDSLHEHIANLAGSPAIKKGILQTVKVVDELVKVMGRHKPENIVIEMARENQTTQKGQKNSRERMKRIEEGIKELGSEVEFSHEYWMRHALTLAKRARDEREVPVGAVLVLNNRVIGEGWNRAIGLHDPTAHAEIMALRQGGLVMQNYRLIDATLYVTFEPCVMCAGAMIHSRIGRVVFGVRNAKTGAAGSLMDVLHYPGMNHRVEITEGILADECAALLCYFFRMPRQVFNAQKKAQSSTDEEVVKKMKNYWRQLLNAKLITQRKFDNLTKAERGGLSELDKAGFIKRQLVETRQITKHVAQILDSRMNTKYDENDKLIREVKVITLKSKLVSDFRKDFQFYKVREINNYHHAHDAYLNAVVGTALIKKYPKLESEFVYGDYKVYDVRKMIAKSEQEIGKATAKYFFYSNIMNFFKTEITLANGEIRKRPLIETNGETGEIVWDKGRDFATVRKVLSMPQVNIVKKTEVQTGGFSKESILPKRNSDKLIARKKDWDPKKYGGFDSPTVAYSVLVVAKVEKGKSKKLKSVKELLGITIMERSSFEKNPIDFLEAKGYKEVKKDLIIKLPKYSLFELENGRKRMLASAGELQKGNELALPSKYVNFLYLASHYEKLKGSPEDNEQKQLFVEQHKHYLDEIIEQISEFSKRVILADANLDKVLSAYNKHRDKPIREQAENIIHLFTLTNLGAPAAFKYFDTTIDRKRYTSTKEVLDATLIHQSITGLYETRIDLSQLGGD

SEQ ID NO: 301 - protein, 1420 aa, synthetic construct
  REGION 1..1420: note = 125 Cas9 delta 792-906TadAins polypeptide sequence
MDKKYSIGLAIGTNSVGWAVITDEYKVPSKKFKVLGNTDRHSIKKNLIGALLFDSGETAEATRLKRTARRRYTRRKNRICYLQEIFSNEMAKVDDSFFHRLEESFLVEEDKKHERHPIFGNIVDEVAYHEKYPTIYHLRKKLVDSTDKADLRLIYLALAHMIKFRGHFLIEGDLNPDNSDVDKLFIQLVQTYNQLFEENPINASGVDAKAILSARLSKSRRLENLIAQLPGEKKNGLFGNLIALSLGLTPNFKSNFDLAEDAKLQLSKDTYDDDLDNLLAQIGDQYADLFLAAKNLSDAILLSDILRVNTEITKAPLSASMIKRYDEHHQDLTLLKALVRQQLPEKYKEIFFDQSKNGYAGYIDGGASQEEFYKFIKPILEKMDGTEELLVKLNREDLLRKQRTFDNGSIPHQIHLGELHAILRRQEDFYPFLKDNREKIEKILTFRIPYYVGPLARGNSRFAWMTRKSEETITPWNFEEVVDKGASAQSFIERMTNFDKNLPNEKVLPKHSLLYEYFTVYNELTKVKYVTEGMRKPAFLSGEQKKAIVDLLFKTNRKVTVKQLKEDYFKKIECFDSVEISGVEDRFNASLGTYHDLLKIIKDKDFLDNEENEDILEDIVLTLTLFEDREMIEERLKTYAHLFDDKVMKQLKRRRYTGWGRLSRKLINGIRDKQSGKTILDFLKSDGFANRNFMQLIHDDSLTFKEDIQKAQVSGQGDSLHEHIANLAGSPAIKKGILQTVKVVDELVKVMGRHKPENIVIEMARENQTTQKGQKNSRERMKRIEEGIKELGSEVEFSHEYWMRHALTLAKRARDEREVPVGAVLVLNNRVIGEGWNRAIGLHDPTAHAEIMALRQGGLVMQNYRLIDATLYVTFEPCVMCAGAMIHSRIGRVVFGVRNAKTGAAGSLMDVLHYPGMNHRVEITEGILADECAALLCYFFRMPRQVFNAQKKAQSSTDGLSELDKAGFIKRQLVETRQITKHVAQILDSRMNTKYDENDKLIREVKVITLKSKLVSDFRKDFQFYKVREINNYHHAHDAYLNAVVGTALIKKYPKLESEFVYGDYKVYDVRKMIAKSEQEIGKATAKYFFYSNIMNFFKTEITLANGEIRKRPLIETNGETGEIVWDKGRDFATVRKVLSMPQVNIVKKTEVQTGGFSKESILPKRNSDKLIARKKDWDPKKYGGFDSPTVAYSVLVVAKVEKGKSKKLKSVKELLGITIMERSSFEKNPIDFLEAKGYKEVKKDLIIKLPKYSLFELENGRKRMLASAGELQKGNELALPSKYVNFLYLASHYEKLKGSPEDNEQKQLFVEQHKHYLDEIIEQISEFSKRVILADANLDKVLSAYNKHRDKPIREQAENIIHLFTLTNLGAPAAFKYFDTTIDRKRYTSTKEVLDATLIHQSITGLYETRIDLSQLGGD

SEQ ID NO: 302 - protein, 1554 aa, synthetic construct
  REGION 1..1554: note = 126 TadA CP65ins 1003 polypeptide sequence
MDKKYSIGLAIGTNSVGWAVITDEYKVPSKKFKVLGNTDRHSIKKNLIGALLFDSGETAEATRLKRTARRRYTRRKNRICYLQEIFSNEMAKVDDSFFHRLEESFLVEEDKKHERHPIFGNIVDEVAYHEKYPTIYHLRKKLVDSTDKADLRLIYLALAHMIKFRGHFLIEGDLNPDNSDVDKLFIQLVQTYNQLFEENPINASGVDAKAILSARLSKSRRLENLIAQLPGEKKNGLFGNLIALSLGLTPNFKSNFDLAEDAKLQLSKDTYDDDLDNLLAQIGDQYADLFLAAKNLSDAILLSDILRVNTEITKAPLSASMIKRYDEHHQDLTLLKALVRQQLPEKYKEIFFDQSKNGYAGYIDGGASQEEFYKFIKPILEKMDGTEELLVKLNREDLLRKQRTFDNGSIPHQIHLGELHAILRRQEDFYPFLKDNREKIEKILTFRIPYYVGPLARGNSRFAWMTRKSEETITPWNFEEVVDKGASAQSFIERMTNFDKNLPNEKVLPKHSLLYEYFTVYNELTKVKYVTEGMRKPAFLSGEQKKAIVDLLFKTNRKVTVKQLKEDYFKKIECFDSVEISGVEDRFNASLGTYHDLLKIIKDKDFLDNEENEDILEDIVLTLTLFEDREMIEERLKTYAHLFDDKVMKQLKRRRYTGWGRLSRKLINGIRDKQSGKTILDFLKSDGFANRNFMQLIHDDSLTFKEDIQKAQVSGQGDSLHEHIANLAGSPAIKKGILQTVKVVDELVKVMGRHKPENIVIEMARENQTTQKGQKNSRERMKRIEEGIKELGSQILKEHPVENTQLQNEKLYLYYLQNGRDMYVDQELDINRLSDYDVDHIVPQSFLKDDSIDNKVLTRSDKNRGKSDNVPSEEVVKKMKNYWRQLLNAKLITQRKFDNLTKAERGGLSELDKAGFIKRQLVETRQITKHVAQILDSRMNTKYDENDKLIREVKVITLKSKLVSDFRKDFQFYKVREINNYHHAHDAYLNAVVGTALIKKYPKTAHAEIMALRQGGLVMQNYRLIDATLYVTFEPCVMCAGAMIHSRIGRVVFGVRNAKTGAAGSLMDVLHYPGMNHRVEITEGILADECAALLCYFFRMPRQVFNAQKKAQSSTDGSSGSETPGTSESATPESSGSEVEFSHEYWMRHALTLAKRARDEREVPVGAVLVLNNRVIGEGWNRAIGLHDPLESEFVYGDYKVYDVRKMIAKSEQEIGKATAKYFFYSNIMNFFKTEITLANGEIRKRPLIETNGETGEIVWDKGRDFATVRKVLSMPQVNIVKKTEVQTGGFSKESILPKRNSDKLIARKKDWDPKKYGGFDSPTVAYSVLVVAKVEKGKSKKLKSVKELLGITIMERSSFEKNPIDFLEAKGYKEVKKDLIIKLPKYSLFELENGRKRMLASAGELQKGNELALPSKYVNFLYLASHYEKLKGSPEDNEQKQLFVEQHKHYLDEIIEQISEFSKRVILADANLDKVLSAYNKHRDKPIREQAENIIHLFTLTNLGAPAAFKYFDTTIDRKRYTSTKEVLDATLIHQSITGLYETRIDLSQLGGD

SEQ ID NO: 303 - protein, 1554 aa, synthetic construct
  REGION 1..1554: note = 127 TadA CP65ins 1016 polypeptide sequence
MDKKYSIGLAIGTNSVGWAVITDEYKVPSKKFKVLGNTDRHSIKKNLIGALLFDSGETAEATRLKRTARRRYTRRKNRICYLQEIFSNEMAKVDDSFFHRLEESFLVEEDKKHERHPIFGNIVDEVAYHEKYPTIYHLRKKLVDSTDKADLRLIYLALAHMIKFRGHFLIEGDLNPDNSDVDKLFIQLVQTYNQLFEENPINASGVDAKAILSARLSKSRRLENLIAQLPGEKKNGLFGNLIALSLGLTPNFKSNFDLAEDAKLQLSKDTYDDDLDNLLAQIGDQYADLFLAAKNLSDAILLSDILRVNTEITKAPLSASMIKRYDEHHQDLTLLKALVRQQLPEKYKEIFFDQSKNGYAGYIDGGASQEEFYKFIKPILEKMDGTEELLVKLNREDLLRKQRTFDNGSIPHQIHLGELHAILRRQEDFYPFLKDNREKIEKILTFRIPYYVGPLARGNSRFAWMTRKSEETITPWNFEEVVDKGASAQSFIERMTNFDKNLPNEKVLPKHSLLYEYFTVYNELTKVKYVTEGMRKPAFLSGEQKKAIVDLLFKTNRKVTVKQLKEDYFKKIECFDSVEISGVEDRFNASLGTYHDLLKIIKDKDFLDNEENEDILEDIVLTLTLFEDREMIEERLKTYAHLFDDKVMKQLKRRRYTGWGRLSRKLINGIRDKQSGKTILDFLKSDGFANRNFMQLIHDDSLTFKEDIQKAQVSGQGDSLHEHIANLAGSPAIKKGILQTVKVVDELVKVMGRHKPENIVIEMARENQTTQKGQKNSRERMKRIEEGIKELGSQILKEHPVENTQLQNEKLYLYYLQNGRDMYVDQELDINRLSDYDVDHIVPQSFLKDDSIDNKVLTRSDKNRGKSDNVPSEEVVKKMKNYWRQLLNAKLITQRKFDNLTKAERGGLSELDKAGFIKRQLVETRQITKHVAQILDSRMNTKYDENDKLIREVKVITLKSKLVSDFRKDFQFYKVREINNYHHAHDAYLNAVVGTALIKKYPKLESEFVYGDYKVTAHAEIMALRQGGLVMQNYRLIDATLYVTFEPCVMCAGAMIHSRIGRVVFGVRNAKTGAAGSLMDVLHYPGMNHRVEITEGILADECAALLCYFFRMPRQVFNAQKKAQSSTDGSSGSETPGTSESATPESSGSEVEFSHEYWMRHALTLAKRARDEREVPVGAVLVLNNRVIGEGWNRAIGLHDPYDVRKMIAKSEQEIGKATAKYFFYSNIMNFFKTEITLANGEIRKRPLIETNGETGEIVWDKGRDFATVRKVLSMPQVNIVKKTEVQTGGFSKESILPKRNSDKLIARKKDWDPKKYGGFDSPTVAYSVLVVAKVEKGKSKKLKSVKELLGITIMERSSFEKNPIDFLEAKGYKEVKKDLIIKLPKYSLFELENGRKRMLASAGELQKGNELALPSKYVNFLYLASHYEKLKGSPEDNEQKQLFVEQHKHYLDEIIEQISEFSKRVILADANLDKVLSAYNKHRDKPIREQAENIIHLFTLTNLGAPAAFKYFDTTIDRKRYTSTKEVLDATLIHQSITGLYETRIDLSQLGGD

SEQ ID NO: 304 - protein, 1554 aa, synthetic construct
  REGION 1..1554: note = 128 TadA CP65ins 1022 polypeptide sequence
MDKKYSIGLAIGTNSVGWAVITDEYKVPSKKFKVLGNTDRHSIKKNLIGALLFDSGETAEATRLKRTARRRYTRRKNRICYLQEIFSNEMAKVDDSFFHRLEESFLVEEDKKHERHPIFGNIVDEVAYHEKYPTIYHLRKKLVDSTDKADLRLIYLALAHMIKFRGHFLIEGDLNPDNSDVDKLFIQLVQTYNQLFEENPINASGVDAKAILSARLSKSRRLENLIAQLPGEKKNGLFGNLIALSLGLTPNFKSNFDLAEDAKLQLSKDTYDDDLDNLLAQIGDQYADLFLAAKNLSDAILLSDILRVNTEITKAPLSASMIKRYDEHHQDLTLLKALVRQQLPEKYKEIFFDQSKNGYAGYIDGGASQEEFYKFIKPILEKMDGTEELLVKLNREDLLRKQRTFDNGSIPHQIHLGELHAILRRQEDFYPFLKDNREKIEKILTFRIPYYVGPLARGNSRFAWMTRKSEETITPWNFEEVVDKGASAQSFIERMTNFDKNLPNEKVLPKHSLLYEYFTVYNELTKVKYVTEGMRKPAFLSGEQKKAIVDLLFKTNRKVTVKQLKEDYFKKIECFDSVEISGVEDRFNASLGTYHDLLKIIKDKDFLDNEENEDILEDIVLTLTLFEDREMIEERLKTYAHLFDDKVMKQLKRRRYTGWGRLSRKLINGIRDKQSGKTILDFLKSDGFANRNFMQLIHDDSLTFKEDIQKAQVSGQGDSLHEHIANLAGSPAIKKGILQTVKVVDELVKVMGRHKPENIVIEMARENQTTQKGQKNSRERMKRIEEGIKELGSQILKEHPVENTQLQNEKLYLYYLQNGRDMYVDQELDINRLSDYDVDHIVPQSFLKDDSIDNKVLTRSDKNRGKSDNVPSEEVVKKMKNYWRQLLNAKLITQRKFDNLTKAERGGLSELDKAGFIKRQLVETRQITKHVAQILDSRMNTKYDENDKLIREVKVITLKSKLVSDFRKDFQFYKVREINNYHHAHDAYLNAVVGTALIKKYPKLESEFVYGDYKVYDVRKMITAHAEIMALRQGGLVMQNYRLIDATLYVTFEPCVMCAGAMIHSRIGRVVFGVRNAKTGAAGSLMDVLHYPGMNHRVEITEGILADECAALLCYFFRMPRQVFNAQKKAQSSTDGSSGSETPGTSESATPESSGSEVEFSHEYWMRHALTLAKRARDEREVPVGAVLVLNNRVIGEGWNRAIGLHDPAKSEQEIGKATAKYFFYSNIMNFFKTEITLANGEIRKRPLIETNGETGEIVWDKGRDFATVRKVLSMPQVNIVKKTEVQTGGFSKESILPKRNSDKLIARKKDWDPKKYGGFDSPTVAYSVLVVAKVEKGKSKKLKSVKELLGITIMERSSFEKNPIDFLEAKGYKEVKKDLIIKLPKYSLFELENGRKRMLASAGELQKGNELALPSKYVNFLYLASHYEKLKGSPEDNEQKQLFVEQHKHYLDEIIEQISEFSKRVILADANLDKVLSAYNKHRDKPIREQAENIIHLFTLTNLGAPAAFKYFDTTIDRKRYTSTKEVLDATLIHQSITGLYETRIDLSQLGGD

SEQ ID NO: 305 - protein, 1554 aa, synthetic construct
  REGION 1..1554: note = 129 TadA CP65ins 1029 polypeptide sequence
MDKKYSIGLAIGTNSVGWAVITDEYKVPSKKFKVLGNTDRHSIKKNLIGALLFDSGETAEATRLKRTARRRYTRRKNRICYLQEIFSNEMAKVDDSFFHRLEESFLVEEDKKHERHPIFGNIVDEVAYHEKYPTIYHLRKKLVDSTDKADLRLIYLALAHMIKFRGHFLIEGDLNPDNSDVDKLFIQLVQTYNQLFEENPINASGVDAKAILSARLSKSRRLENLIAQLPGEKKNGLFGNLIALSLGLTPNFKSNFDLAEDAKLQLSKDTYDDDLDNLLAQIGDQYADLFLAAKNLSDAILLSDILRVNTEITKAPLSASMIKRYDEHHQDLTLLKALVRQQLPEKYKEIFFDQSKNGYAGYIDGGASQEEFYKFIKPILEKMDGTEELLVKLNREDLLRKQRTFDNGSIPHQIHLGELHAILRRQEDFYPFLKDNREKIEKILTFRIPYYVGPLARGNSRFAWMTRKSEETITPWNFEEVVDKGASAQSFIERMTNFDKNLPNEKVLPKHSLLYEYFTVYNELTKVKYVTEGMRKPAFLSGEQKKAIVDLLFKTNRKVTVKQLKEDYFKKIECFDSVEISGVEDRFNASLGTYHDLLKIIKDKDFLDNEENEDILEDIVLTLTLFEDREMIEERLKTYAHLFDDKVMKQLKRRRYTGWGRLSRKLINGIRDKQSGKTILDFLKSDGFANRNFMQLIHDDSLTFKEDIQKAQVSGQGDSLHEHIANLAGSPAIKKGILQTVKVVDELVKVMGRHKPENIVIEMARENQTTQKGQKNSRERMKRIEEGIKELGSQILKEHPVENTQLQNEKLYLYYLQNGRDMYVDQELDINRLSDYDVDHIVPQSFLKDDSIDNKVLTRSDKNRGKSDNVPSEEVVKKMKNYWRQLLNAKLITQRKFDNLTKAERGGLSELDKAGFIKRQLVETRQITKHVAQILDSRMNTKYDENDKLIREVKVITLKSKLVSDFRKDFQFYKVREINNYHHAHDAYLNAVVGTALIKKYPKLESEFVYGDYKVYDVRKMIAKSEQEITAHAEIMALRQGGLVMQNYRLIDATLYVTFEPCVMCAGAMIHSRIGRVVFGVRNAKTGAAGSLMDVLHYPGMNHRVEITEGILADECAALLCYFFRMPRQVFNAQKKAQSSTDGSSGSETPGTSESATPESSGSEVEFSHEYWMRHALTLAKRARDEREVPVGAVLVLNNRVIGEGWNRAIGLHDPGKATAKYFFYSNIMNFFKTEITLANGEIRKRPLIETNGETGEIVWDKGRDFATVRKVLSMPQVNIVKKTEVQTGGFSKESILPKRNSDKLIARKKDWDPKKYGGFDSPTVAYSVLVVAKVEKGKSKKLKSVKELLGITIMERSSFEKNPIDFLEAKGYKEVKKDLIIKLPKYSLFELENGRKRMLASAGELQKGNELALPSKYVNFLYLASHYEKLKGSPEDNEQKQLFVEQHKHYLDEIIEQISEFSKRVILADANLDKVLSAYNKHRDKPIREQAENIIHLFTLTNLGAPAAFKYFDTTIDRKRYTSTKEVLDATLIHQSITGLYETRIDLSQLGGD

SEQ ID NO: 306 - protein, 1554 aa, synthetic construct
  REGION 1..1554: note = 130 TadA CP65ins 1041 polypeptide sequence
MDKKYSIGLAIGTNSVGWAVITDEYKVPSKKFKVLGNTDRHSIKKNLIGALLFDSGETAEATRLKRTARRRYTRRKNRICYLQEIFSNEMAKVDDSFFHRLEESFLVEEDKKHERHPIFGNIVDEVAYHEKYPTIYHLRKKLVDSTDKADLRLIYLALAHMIKFRGHFLIEGDLNPDNSDVDKLFIQLVQTYNQLFEENPINASGVDAKAILSARLSKSRRLENLIAQLPGEKKNGLFGNLIALSLGLTPNFKSNFDLAEDAKLQLSKDTYDDDLDNLLAQIGDQYADLFLAAKNLSDAILLSDILRVNTEITKAPLSASMIKRYDEHHQDLTLLKALVRQQLPEKYKEIFFDQSKNGYAGYIDGGASQEEFYKFIKPILEKMDGTEELLVKLNREDLLRKQRTFDNGSIPHQIHLGELHAILRRQEDFYPFLKDNREKIEKILTFRIPYYVGPLARGNSRFAWMTRKSEETITPWNFEEVVDKGASAQSFIERMTNFDKNLPNEKVLPKHSLLYEYFTVYNELTKVKYVTEGMRKPAFLSGEQKKAIVDLLFKTNRKVTVKQLKEDYFKKIECFDSVEISGVEDRFNASLGTYHDLLKIIKDKDFLDNEENEDILEDIVLTLTLFEDREMIEERLKTYAHLFDDKVMKQLKRRRYTGWGRLSRKLINGIRDKQSGKTILDFLKSDGFANRNFMQLIHDDSLTFKEDIQKAQVSGQGDSLHEHIANLAGSPAIKKGILQTVKVVDELVKVMGRHKPENIVIEMARENQTTQKGQKNSRERMKRIEEGIKELGSQILKEHPVENTQLQNEKLYLYYLQNGRDMYVDQELDINRLSDYDVDHIVPQSFLKDDSIDNKVLTRSDKNRGKSDNVPSEEVVKKMKNYWRQLLNAKLITQRKFDNLTKAERGGLSELDKAGFIKRQLVETRQITKHVAQILDSRMNTKYDENDKLIREVKVITLKSKLVSDFRKDFQFYKVREINNYHHAHDAYLNAVVGTALIKKYPKLESEFVYGDYKVYDVRKMIAKSEQEIGKATAKYFFYSTAHAEIMALRQGGLVMQNYRLIDATLYVTFEPCVMCAGAMIHSRIGRVVFGVRNAKTGAAGSLMDVLHYPGMNHRVEITEGILADECAALLCYFFRMPRQVFNAQKKAQSSTDGSSGSETPGTSESATPESSGSEVEFSHEYWMRHALTLAKRARDEREVPVGAVLVLNNRVIGEGWNRAIGLHDPNIMNFFKTEITLANGEIRKRPLIETNGETGEIVWDKGRDFATVRKVLSMPQVNIVKKTEVQTGGFSKESILPKRNSDKLIARKKDWDPKKYGGFDSPTVAYSVLVVAKVEKGKSKKLKSVKELLGITIMERSSFEKNPIDFLEAKGYKEVKKDLIIKLPKYSLFELENGRKRMLASAGELQKGNELALPSKYVNFLYLASHYEKLKGSPEDNEQKQLFVEQHKHYLDEIIEQISEFSKRVILADANLDKVLSAYNKHRDKPIREQAENIIHLFTLTNLGAPAAFKYFDTTIDRKRYTSTKEVLDATLIHQSITGLYETRIDLSQLGGD

SEQ ID NO: 307 - protein, 1554 aa, synthetic construct
  REGION 1..1554: note = 131 TadA CP65ins 1054 polypeptide sequence
MDKKYSIGLAIGTNSVGWAVITDEYKVPSKKFKVLGNTDRHSIKKNLIGALLFDSGETAEATRLKRTARRRYTRRKNRICYLQEIFSNEMAKVDDSFFHRLEESFLVEEDKKHERHPIFGNIVDEVAYHEKYPTIYHLRKKLVDSTDKADLRLIYLALAHMIKFRGHFLIEGDLNPDNSDVDKLFIQLVQTYNQLFEENPINASGVDAKAILSARLSKSRRLENLIAQLPGEKKNGLFGNLIALSLGLTPNFKSNFDLAEDAKLQLSKDTYDDDLDNLLAQIGDQYADLFLAAKNLSDAILLSDILRVNTEITKAPLSASMIKRYDEHHQDLTLLKALVRQQLPEKYKEIFFDQSKNGYAGYIDGGASQEEFYKFIKPILEKMDGTEELLVKLNREDLLRKQRTFDNGSIPHQIHLGELHAILRRQEDFYPFLKDNREKIEKILTFRIPYYVGPLARGNSRFAWMTRKSEETITPWNFEEVVDKGASAQSFIERMTNFDKNLPNEKVLPKHSLLYEYFTVYNELTKVKYVTEGMRKPAFLSGEQKKAIVDLLFKTNRKVTVKQLKEDYFKKIECFDSVEISGVEDRFNASLGTYHDLLKIIKDKDFLDNEENEDILEDIVLTLTLFEDREMIEERLKTYAHLFDDKVMKQLKRRRYTGWGRLSRKLINGIRDKQSGKTILDFLKSDGFANRNFMQLIHDDSLTFKEDIQKAQVSGQGDSLHEHIANLAGSPAIKKGILQTVKVVDELVKVMGRHKPENIVIEMARENQTTQKGQKNSRERMKRIEEGIKELGSQILKEHPVENTQLQNEKLYLYYLQNGRDMYVDQELDINRLSDYDVDHIVPQSFLKDDSIDNKVLTRSDKNRGKSDNVPSEEVVKKMKNYWRQLLNAKLITQRKFDNLTKAERGGLSELDKAGFIKRQLVETRQITKHVAQILDSRMNTKYDENDKLIREVKVITLKSKLVSDFRKDFQFYKVREINNYHHAHDAYLNAVVGTALIKKYPKLESEFVYGDYKVYDVRKMIAKSEQEIGKATAKYFFYSNIMNFFKTEITLANTAHAEIMALRQGGLVMQNYRLIDATLYVTFEPCVMCAGAMIHSRIGRVVFGVRNAKTGAAGSLMDVLHYPGMNHRVEITEGILADECAALLCYFFRMPRQVFNAQKKAQSSTDGSSGSETPGTSESATPESSGSEVEFSHEYWMRHALTLAKRARDEREVPVGAVLVLNNRVIGEGWNRAIGLHDPGEIRKRPLIETNGETGEIVWDKGRDFATVRKVLSMPQVNIVKKTEVQTGGFSKESILPKRNSDKLIARKKDWDPKKYGGFDSPTVAYSVLVVAKVEKGKSKKLKSVKELLGITIMERSSFEKNPIDFLEAKGYKEVKKDLIIKLPKYSLFELENGRKRMLASAGELQKGNELALPSKYVNFLYLASHYEKLKGSPEDNEQKQLFVEQHKHYLDEIIEQISEFSKRVILADANLDKVLSAYNKHRDKPIREQAENIIHLFTLTNLGAPAAFKYFDTTIDRKRYTSTKEVLDATLIHQSITGLYETRIDLSQLGGD

SEQ ID NO: 308 - protein, 1554 aa, synthetic construct
  REGION 1..1554: note = 132 TadA CP65ins 1246 polypeptide sequence
MDKKYSIGLAIGTNSVGWAVITDEYKVPSKKFKVLGNTDRHSIKKNLIGALLFDSGETAEATRLKRTARRRYTRRKNRICYLQEIFSNEMAKVDDSFFHRLEESFLVEEDKKHERHPIFGNIVDEVAYHEKYPTIYHLRKKLVDSTDKADLRLIYLALAHMIKFRGHFLIEGDLNPDNSDVDKLFIQLVQTYNQLFEENPINASGVDAKAILSARLSKSRRLENLIAQLPGEKKNGLFGNLIALSLGLTPNFKSNFDLAEDAKLQLSKDTYDDDLDNLLAQIGDQYADLFLAAKNLSDAILLSDILRVNTEITKAPLSASMIKRYDEHHQDLTLLKALVRQQLPEKYKEIFFDQSKNGYAGYIDGGASQEEFYKFIKPILEKMDGTEELLVKLNREDLLRKQRTFDNGSIPHQIHLGELHAILRRQEDFYPFLKDNREKIEKILTFRIPYYVGPLARGNSRFAWMTRKSEETITPWNFEEVVDKGASAQSFIERMTNFDKNLPNEKVLPKHSLLYEYFTVYNELTKVKYVTEGMRKPAFLSGEQKKAIVDLLFKTNRKVTVKQLKEDYFKKIECFDSVEISGVEDRFNASLGTYHDLLKIIKDKDFLDNEENEDILEDIVLTLTLFEDREMIEERLKTYAHLFDDKVMKQLKRRRYTGWGRLSRKLINGIRDKQSGKTILDFLKSDGFANRNFMQLIHDDSLTFKEDIQKAQVSGQGDSLHEHIANLAGSPAIKKGILQTVKVVDELVKVMGRHKPENIVIEMARENQTTQKGQKNSRERMKRIEEGIKELGSQILKEHPVENTQLQNEKLYLYYLQNGRDMYVDQELDINRLSDYDVDHIVPQSFLKDDSIDNKVLTRSDKNRGKSDNVPSEEVVKKMKNYWRQLLNAKLITQRKFDNLTKAERGGLSELDKAGFIKRQLVETRQITKHVAQILDSRMNTKYDENDKLIREVKVITLKSKLVSDFRKDFQFYKVREINNYHHAHDAYLNAVVGTALIKKYPKLESEFVYGDYKVYDVRKMIAKSEQEIGKATAKYFFYSNIMNFFKTEITLANGEIRKRPLIETNGETGEIVWDKGRDFATVRKVLSMPQVNIVKKTEVQTGGFSKESILPKRNSDKLIARKKDWDPKKYGGFDSPTVAYSVLVVAKVEKGKSKKLKSVKELLGITIMERSSFEKNPIDFLEAKGYKEVKKDLIIKLPKYSLFELENGRKRMLASAGELQKGNELALPSKYVNFLYLASHYEKLKGTAHAEIMALRQGGLVMQNYRLIDATLYVTFEPCVMCAGAMIHSRIGRVVFGVRNAKTGAAGSLMDVLHYPGMNHRVEITEGILADECAALLCYFFRMPRQVFNAQKKAQSSTDGSSGSETPGTSESATPESSGSEVEFSHEYWMRHALTLAKRARDEREVPVGAVLVLNNRVIGEGWNRAIGLHDPSPEDNEQKQLFVEQHKHYLDEIIEQISEFSKRVILADANLDKVLSAYNKHRDKPIREQAENIIHLFTLTNLGAPAAFKYFDTTIDRKRYTSTKEVLDATLIHQSITGLYETRIDLSQLGGD

SEQ ID NO: 309 - protein, 160 aa, Staphylococcus aureus
  REGION 1..160: note = MISC_FEATURE - TadA polypeptide sequence
MGSHMTNDIYFMTLAIEEAKKAAQLGEVPIGAIITKDDEVIARAHNLRETLQQPTAHAEHIAIERAAKVLGSWRLEGCTLYVTLEPCVMCAGTIVMSRIPRVVYGADDPKGGCSGSLMNLLQQSNFNHRAIVDKGVLKEACSTLLTTFFKNLRANKKSTN

SEQ ID NO: 310 - protein, 161 aa, Bacillus subtilis
  REGION 1..161: note = MISC_FEATURE - TadA polypeptide sequence
MTQDELYMKEAIKEAKKAEEKGEVPIGAVLVINGEIIARAHNLRETEQRSIAHAEMLVIDEACKALGTWRLEGATLYVTLEPCPMCAGAVVLSRVEKVVFGAFDPKGGCSGTLMNLLQEERFNHQAEVVSGVLEEECGGMLSAFFRELRKKKKAARKNLSE

SEQ ID NO: 311 - protein, 183 aa, Salmonella typhimurium
  REGION 1..183: note = MISC_FEATURE - TadA polypeptide sequence
MPPAFITGVTSLSDVELDHEYWMRHALTLAKRAWDEREVPVGAVLVHNHRVIGEGWNRPIGRHDPTAHAEIMALRQGGLVLQNYRLLDTTLYVTLEPCVMCAGAMVHSRIGRVVFGARDAKTGAAGSLIDVLHHPGMNHRVEIIEGVLRDECATLLSDFFRMRRQEIKALKKADRAEGAGPAV

SEQ ID NO: 312 - protein, 164 aa, Shewanella putrefaciens
  REGION 1..164: note = MISC_FEATURE - TadA polypeptide sequence
MDEYWMQVAMQMAEKAEAAGEVPVGAVLVKDGQQIATGYNLSISQHDPTAHAEILCLRSAGKKLENYRLLDATLYITLEPCAMCAGAMVHSRIARVVYGARDEKTGAAGTVVNLLQHPAFNHQVEVTSGVLAEACSAQLSRFFKRRRDEKKALKLAQRAQQGIE

SEQ ID NO: 313 - protein, 173 aa, Haemophilus influenzae
  REGION 1..173: note = MISC_FEATURE - TadA polypeptide sequence
MDAAKVRSEFDEKMMRYALELADKAEALGEIPVGAVLVDDARNIIGEGWNLSIVQSDPTAHAEIIALRNGAKNIQNYRLLNSTLYVTLEPCTMCAGAILHSRIKRLVFGASDYKTGAIGSRFHFFDDYKMNHTLEITSGVLAEECSQKLSTFFQKRREEKKIEKALLKSLSDK

SEQ ID NO: 314 - protein, 161 aa, Caulobacter crescentus
  REGION 1..161: note = MISC_FEATURE - TadA polypeptide sequence
MRTDESEDQDHRMMRLALDAARAAAEAGETPVGAVILDPSTGEVIATAGNGPIAAHDPTAHAEIAAMRAAAAKLGNYRLTDLTLVVTLEPCAMCAGAISHARIGRVVFGADDPKGGAVVHGPKFFAQPTCHWRPEVTGGVLADESADLLRGFFRARRKAKI

SEQ ID NO: 315 - protein, 179 aa, Geobacter sulfurreducens
  REGION 1..179: note = MISC_FEATURE - TadA polypeptide sequence
MSSLKKTPIRDDAYWMGKAIREAAKAAARDEVPIGAVIVRDGAVIGRGHNLREGSNDPSAHAEMIAIRQAARRSANWRLTGATLYVTLEPCLMCMGAIILARLERVVFGCYDPKGGAAGSLYDLSADPRLNHQVRLSPGVCQEECGTMLSDFFRDLRRRKKAKATPALFIDERKVPPEP

SEQ ID NO: 316 - protein, 167 aa, synthetic construct
  REGION 1..167: note = TadA*8 polypeptide sequence
MSEVEFSHEYWMRHALTLAKRARDEREVPVGAVLVLNNRVIGEGWNRAIGLHDPTAHAEIMALRQGGLVMQNYRLIDATLYVTFEPCVMCAGAMIHSRIGRVVFGVRNAKTGAAGSLMDVLHYPGMNHRVEITEGILADECAALLCTFFRMPRQVFNAQKKAQSSTD

SEQ ID NO: 317 - RNA, 80 nt, synthetic construct
  misc_feature 1..80: note = gRNA scaffold polynucleotide sequence
  source 1..80: mol_type = other RNA
gttttagagctagaaatagcaagttaaaataaggctagtccgttatcaacttgaaaaagtggcaccgagtcggtgctttt

SEQ ID NO: 318 - RNA, 125 nt, synthetic construct
  misc_feature 1..125: note = gRNA scaffold polynucleotide sequence
  source 1..125: mol_type = other RNA
gtttttgtactctcaagatttaagtaactgtacaacgaaacttacacagttacttaaatcttgcagaagctacaaagataaggcttcatgccgaaatcaacaccctgtcattttatggcagggtg

SEQ ID NO: 319 - RNA, 76 nt, Streptococcus pyogenes
  misc_feature 1..76: note = S. pyogenes gRNA scaffold oligonucleotide sequence
  source 1..76: mol_type = other RNA
gttttagagctagaaatagcaagttaaaataaggctagtccgttatcaacttgaaaaagtggcaccgagtcggtgc

SEQ ID NO: 320 - RNA, 84 nt, Staphylococcus aureus
  misc_feature 1..84: note = S. aureus gRNA scaffold oligonucleotide sequence
  source 1..84: mol_type = other RNA
gttttagtactctgtaatgaaaattacagaatctactaaaacaaggcaaaatgccgtgtttatctcgtcaacttgttggcgaga

SEQ ID NO: 321 - RNA, 97 nt, Bacillus hisashii
  misc_feature 1..97: note = BhCas12b gRNA scaffold oligonucleotide sequence
  source 1..97: mol_type = other RNA
gttctgtcttttggtcaggacaaccgtctagctataagtgctgcagggtgtgagaaactcctattgctggacgatgtctcttacgaggcattagcac

SEQ ID NO: 322 - RNA, 88 nt, Bacillus sp.
  misc_feature 1..88: note = BvCas12b gRNA scaffold oligonucleotide sequence
  source 1..88: mol_type = other RNA
gacctatagggtcaatgaatctgtgcgtgtgccataagtaattaaaaattacccaccacaggagcacctgaaaacaggtgcttggcac

SEQ ID NO: 323 - RNA, 80 nt, synthetic construct
  misc_feature 1..80: note = gRNA scaffold nucleotide sequence; oligonucleotide sequence
  modified_base 78..80: mod_base = um
  misc_feature 78..80: note = In embodiments, a nucleotide(s) is linked to the preceding 5' nucleotide by a 3' phosphorothioate internucleotide linkage
  source 1..80: mol_type = other RNA
gttttagagctagaaatagcaagttaaaataaggctagtccgttatcaacttgaaaaagtgggaccgagtcggtgctttt

SEQ ID NO: 324 - RNA, 80 nt, synthetic construct; identical to SEQ ID NO: 317
  misc_feature 1..80: note = gRNA scaffold nucleotide sequence
  misc_feature 78..80: note = In embodiments, a nucleotide(s) is linked to the preceding 5' nucleotide by a 3' phosphorothioate internucleotide linkage
  modified_base 78..80: mod_base = um
  source 1..80: mol_type = other RNA

SEQ ID NO: 325 - RNA, 117 nt, Bacillus hisashii
  misc_feature 1..117: note = BhCas12b gRNA scaffold + guide sequence; oligonucleotide sequence
  misc_feature 1..97: note = BhCas12b sgRNA scaffold
  source 1..117: mol_type = other RNA
gttctgtcttttggtcaggacaaccgtctagctataagtgctgcagggtgtgagaaactcctattgctggacgatgtctcttacgaggcattagcacnnnnnnnnnnnnnnnnnnnn

SEQ ID NO: 326 - RNA, 108 nt, Bacillus sp.
  misc_feature 1..108: note = BvCas12b gRNA scaffold + guide sequence; oligonucleotide sequence
  misc_feature 1..88: note = BvCas12b gRNA scaffold
  source 1..108: mol_type = other RNA
gacctatagggtcaatgaatctgtgcgtgtgccataagtaattaaaaattacccaccacaggagcacctgaaaacaggtgcttggcacnnnnnnnnnnnnnnnnnnnn

SEQ ID NO: 327 - RNA, 119 nt, Alicyclobacillus acidiphilus
  misc_feature 1..119: note = AaCas12b gRNA scaffold + guide sequence; oligonucleotide sequence
  misc_feature 1..99: note = AaCas12b gRNA scaffold
  source 1..119: mol_type = other RNA
gtctaaaggacagaatttttcaacgggtgtgccaatggccactttccaggtggcaaagcccgttgaacttctcaaaaagaacgatctgagaagtggcacnnnnnnnnnnnnnnnnnnnn

SEQ ID NO: 328 - protein, 29 aa, synthetic construct
  REGION 1..29: note = synthetic polypeptide sequence
PKKKRKVEGADKRTADGSEFESPKKKRKV

SEQ ID NO: 329 - protein, 23 aa, synthetic construct
  REGION 1..23: note = synthetic peptide sequence
RKSGKIAAIVVKRPRKPKKKRKV

SEQ ID NO: 330 - protein, 8 aa, synthetic construct
  REGION 1..8: note = synthetic peptide sequence
SGGSSGGS

SEQ ID NO: 331 - protein, 1609 aa, synthetic construct
  REGION 1..1609: note = pNMG-B335ABE8.1_Y147T_CP5_NGC PAM_monomer polypeptide sequence
MSEVEFSHEYWMRHALTLAKRARDEREVPVGAVLVLNNRVIGEGWNRAIGLHDPTAHAEIMALRQGGLVMQNYRLIDATLYVTFEPCVMCAGAMIHSRIGRVVFGVRNAKTGAAGSLMDVLHYPGMNHRVEITEGILADECAALLCTFFRMPRQVFNAQKKAQSSTDSGGSSGGSSGSETPGTSESATPESSGGSSGGSEIGKATAKYFFYSNIMNFFKTEITLANGEIRKRPLIETNGETGEIVWDKGRDFATVRKVLSMPQVNIVKKTEVQTGGFSKESILPKRNSDKLIARKKDWDPKKYGGFMQPTVAYSVLVVAKVEKGKSKKLKSVKELLGITIMERSSFEKNPIDFLEAKGYKEVKKDLIIKLPKYSLFELENGRKRMLASAKFLQKGNELALPSKYVNFLYLASHYEKLKGSPEDNEQKQLFVEQHKHYLDEIIEQISEFSKRVILADANLDKVLSAYNKHRDKPIREQAENIIHLFTLTNLGAPRAFKYFDTTIARKEYRSTKEVLDATLIHQSITGLYETRIDLSQLGGDGGSGGSGGSGGSGGSGGSGGMDKKYSIGLAIGTNSVGWAVITDEYKVPSKKFKVLGNTDRHSIKKNLIGALLFDSGETAEATRLKRTARRRYTRRKNRICYLQEIFSNEMAKVDDSFFHRLEESFLVEEDKKHERHPIFGNIVDEVAYHEKYPTIYHLRKKLVDSTDKADLRLIYLALAHMIKFRGHFLIEGDLNPDNSDVDKLFIQLVQTYNQLFEENPINASGVDAKAILSARLSKSRRLENLIAQLPGEKKNGLFGNLIALSLGLTPNFKSNFDLAEDAKLQLSKDTYDDDLDNLLAQIGDQYADLFLAAKNLSDAILLSDILRVNTEITKAPLSASMIKRYDEHHQDLTLLKALVRQQLPEKYKEIFFDQSKNGYAGYIDGGASQEEFYKFIKPILEKMDGTEELLVKLNREDLLRKQRTFDNGSIPHQIHLGELHAILRRQEDFYPFLKDNREKIEKILTFRIPYYVGPLARGNSRFAWMTRKSEETITPWNFEEVVDKGASAQSFIERMTNFDKNLPNEKVLPKHSLLYEYFTVYNELTKVKYVTEGMRKPAFLSGEQKKAIVDLLFKTNRKVTVKQLKEDYFKKIECFDSVEISGVEDRFNASLGTYHDLLKIIKDKDFLDNEENEDILEDIVLTLTLFEDREMIEERLKTYAHLFDDKVMKQLKRRRYTGWGRLSRKLINGIRDKQSGKTILDFLKSDGFANRNFMQLIHDDSLTFKEDIQKAQVSGQGDSLHEHIANLAGSPAIKKGILQTVKVVDELVKVMGRHKPENIVIEMARENQTTQKGQKNSRERMKRIEEGIKELGSQILKEHPVENTQLQNEKLYLYYLQNGRDMYVDQELDINRLSDYDVDHIVPQSFLKDDSIDNKVLTRSDKNRGKSDNVPSEEVVKKMKNYWRQLLNAKLITQRKFDNLTKAERGGLSELDKAGFIKRQLVETRQITKHVAQILDSRMNTKYDENDKLIREVKVITLKSKLVSDFRKDFQFYKVREINNYHHAHDAYLNAVVGTALIKKYPKLESEFVYGDYKVYDVRKMIAKSEQEGADKRTADGSEFESPKKKRKV

SEQ ID NO: 332 - protein, 1807 aa, synthetic construct
  REGION 1..1807: note = pNMG-357_ABE8.14 with NGC PAMCP5 polypeptide sequence
  REGION 1..174: note = MISC_FEATURE - Adenosine deaminase sequence
  REGION 175..198: note = MISC_FEATURE - Linker sequence
  REGION 199..365: note = MISC_FEATURE - Adenosine deaminase sequence
  REGION 366..397: note = MISC_FEATURE - Linker sequence
  REGION 398..738: note = MISC_FEATURE - Sequence derived from Cas9
  REGION 739..759: note = MISC_FEATURE - Linker sequence
  REGION 760..1785: note = MISC_FEATURE - Sequence derived from Cas9
  REGION 1786..1807: note = MISC_FEATURE - Bipartite nuclear localization sequence
MSEVEFSHEYWMRHALTLAKRAWDEREVPVGAVLVHNNRVIGEGWNRPIGRHDPTAHAEIMALRQGGLVMQNYRLIDATLYVTLEPCVMCAGAMIHSRIGRVVFGARDAKTGAAGSLMDVLHHPGMNHRVEITEGILADECAALLSDFFRMRRQEIKAQKKAQSSTDGGSSGGSSGSETPGTSESATPESSGGSSGGSMSEVEFSHEYWMRHALTLAKRARDEREVPVGAVLVLNNRVIGEGWNRAIGLHDPTAHAEIMALRQGGLVMQNYRLIDATLYVTFEPCVMCAGAMIHSRIGRVVFGVRNAKTGAAGSLMDVLHYPGMNHRVEITEGILADECAALLCTFFRMPRQVFNAQKKAQSSTDSGGSSGGSSGSETPGTSESATPESSGGSSGGSEIGKATAKYFFYSNIMNFFKTEITLANGEIRKRPLIETNGETGEIVWDKGRDFATVRKVLSMPQVNIVKKTEVQTGGFSKESILPKRNSDKLIARKKDWDPKKYGGFMQPTVAYSVLVVAKVEKGKSKKLKSVKELLGITIMERSSFEKNPIDFLEAKGYKEVKKDLIIKLPKYSLFELENGRKRMLASAKFLQKGNELALPSKYVNFLYLASHYEKLKGSPEDNEQKQLFVEQHKHYLDEIIEQISEFSKRVILADANLDKVLSAYNKHRDKPIREQAENIIHLFTLTNLGAPRAFKYFDTTIARKEYRSTKEVLDATLIHQSITGLYETRIDLSQLGGDGGSGGSGGSGGSGGSGGSGGMDKKYSIGLAIGTNSVGWAVITDEYKVPSKKFKVLGNTDRHSIKKNLIGALLFDSGETAEATRLKRTARRRYTRRKNRICYLQEIFSNEMAKVDDSFFHRLEESFLVEEDKKHERHPIFGNIVDEVAYHEKYPTIYHLRKKLVDSTDKADLRLIYLALAHMIKFRGHFLIEGDLNPDNSDVDKLFIQLVQTYNQLFEENPINASGVDAKAILSARLSKSRRLENLIAQLPGEKKNGLFGNLIALSLGLTPNFKSNFDLAEDAKLQLSKDTYDDDLDNLLAQIGDQYADLFLAAKNLSDAILLSDILRVNTEITKAPLSASMIKRYDEHHQDLTLLKALVRQQLPEKYKEIFFDQSKNGYAGYIDGGASQEEFYKFIKPILEKMDGTEELLVKLNREDLLRKQRTFDNGSIPHQIHLGELHAILRRQEDFYPFLKDNREKIEKILTFRIPYYVGPLARGNSRFAWMTRKSEETITPWNFEEVVDKGASAQSFIERMTNFDKNLPNEKVLPKHSLLYEYFTVYNELTKVKYVTEGMRKPAFLSGEQKKAIVDLLFKTNRKVTVKQLKEDYFKKIECFDSVEISGVEDRFNASLGTYHDLLKIIKDKDFLDNEENEDILEDIVLTLTLFEDREMIEERLKTYAHLFDDKVMKQLKRRRYTGWGRLSRKLINGIRDKQSGKTILDFLKSDGFANRNFMQLIHDDSLTFKEDIQKAQVSGQGDSLHEHIANLAGSPAIKKGILQTVKVVDELVKVMGRHKPENIVIEMARENQTTQKGQKNSRERMKRIEEGIKELGSQILKEHPVENTQLQNEKLYLYYLQNGRDMYVDQELDINRLSDYDVDHIVPQSFLKDDSIDNKVLTRSDKNRGKSDNVPSEEVVKKMKNYWRQLLNAKLITQRKFDNLTKAERGGLSELDKAGFIKRQLVETRQITKHVAQILDSRMNTKYDENDKLIREVKVITLKSKLVSDFRKDFQFYKVREINNYHHAHDAYLNAVVGTALIKKYPKLESEFVYGDYKVYDVRKMIAKSEQEGADKRTADGSEFESPKKKRKV

SEQ ID NO: 333 - protein, 1588 aa, synthetic construct
  REGION 1..1588: note = ABE8.8-m polypeptide sequence
  REGION 1..167: note = MISC_FEATURE - Adenosine deaminase sequence
  REGION 168..199: note = MISC_FEATURE - Linker sequence
  REGION 200..1566: note = MISC_FEATURE - Sequence derived from Cas9
  REGION 1567..1588: note = MISC_FEATURE - Bipartite nuclear localization sequence
MSEVEFSHEYWMRHALTLAKRARDEREVPVGAVLVLNNRVIGEGWNRAIGLHDPTAHAEIMALRQGGLVMQNYRLIDATLYVTFEPCVMCAGAMIHSRIGRVVFGVRNAKTGAAGSLMDVLHHPGMNHRVEITEGILADECAALLCRFFRMPRRVFNAQKKAQSSTDSGGSSGGSSGSETPGTSESATPESSGGSSGGSDKKYSIGLAIGTNSVGWAVITDEYKVPSKKFKVLGNTDRHSIKKNLIGALLFDSGETAEATRLKRTARRRYTRRKNRICYLQEIFSNEMAKVDDSFFHRLEESFLVEEDKKHERHPIFGNIVDEVAYHEKYPTIYHLRKKLVDSTDKADLRLIYLALAHMIKFRGHFLIEGDLNPDNSDVDKLFIQLVQTYNQLFEENPINASGVDAKAILSARLSKSRRLENLIAQLPGEKKNGLFGNLIALSLGLTPNFKSNFDLAEDAKLQLSKDTYDDDLDNLLAQIGDQYADLFLAAKNLSDAILLSDILRVNTEITKAPLSASMIKRYDEHHQDLTLLKALVRQQLPEKYKEIFFDQSKNGYAGYIDGGASQEEFYKFIKPILEKMDGTEELLVKLNREDLLRKQRTFDNGSIPHQIHLGELHAILRRQEDFYPFLKDNREKIEKILTFRIPYYVGPLARGNSRFAWMTRKSEETITPWNFEEVVDKGASAQSFIERMTNFDKNLPNEKVLPKHSLLYEYFTVYNELTKVKYVTEGMRKPAFLSGEQKKAIVDLLFKTNRKVTVKQLKEDYFKKIECFDSVEISGVEDRFNASLGTYHDLLKIIKDKDFLDNEENEDILEDIVLTLTLFEDREMIEERLKTYAHLFDDKVMKQLKRRRYTGWGRLSRKLINGIRDKQSGKTILDFLKSDGFANRNFMQLIHDDSLTFKEDIQKAQVSGQGDSLHEHIANLAGSPAIKKGILQTVKVVDELVKVMGRHKPENIVIEMARENQTTQKGQKNSRERMKRIEEGIKELGSQILKEHPVENTQLQNEKLYLYYLQNGRDMYVDQELDINRLSDYDVDHIVPQSFLKDDSIDNKVLTRSDKNRGKSDNVPSEEVVKKMKNYWRQLLNAKLITQRKFDNLTKAERGGLSELDKAGFIKRQLVETRQITKHVAQILDSRMNTKYDENDKLIREVKVITLKSKLVSDFRKDFQFYKVREINNYHHAHDAYLNAVVGTALIKKYPKLESEFVYGDYKVYDVRKMIAKSEQEIGKATAKYFFYSNIMNFFKTEITLANGEIRKRPLIETNGETGEIVWDKGRDFATVRKVLSMPQVNIVKKTEVQTGGFSKESILPKRNSDKLIARKKDWDPKKYGGFDSPTVAYSVLVVAKVEKGKSKKLKSVKELLGITIMERSSFEKNPIDFLEAKGYKEVKKDLIIKLPKYSLFELENGRKRMLASAGELQKGNELALPSKYVNFLYLASHYEKLKGSPEDNEQKQLFVEQHKHYLDEIIEQISEFSKRVILADANLDKVLSAYNKHRDKPIREQAENIIHLFTLTNLGAPAAFKYFDTTIDRKRYTSTKEVLDATLIHQSITGLYETRIDLSQLGGDEGADKRTADGSEFESPKKKRKV

SEQ ID NO: 334 - protein, 1786 aa, synthetic construct
  REGION 1..1786: note = ABE8.8-d polypeptide sequence
  REGION 1..167: note = MISC_FEATURE - Adenosine deaminase sequence
  REGION 168..199: note = MISC_FEATURE - Linker sequence
  REGION 200..365: note = MISC_FEATURE - Adenosine deaminase sequence
  REGION 366..397: note = MISC_FEATURE - Linker sequence
  REGION 398..1764: note = MISC_FEATURE - Sequence derived from Cas9
  REGION 1765..1786: note = MISC_FEATURE - Bipartite nuclear localization sequence
MSEVEFSHEYWMRHALTLAKRAWDEREVPVGAVLVHNNRVIGEGWNRPIGRHDPTAHAEIMALRQGGLVMQNYRLIDATLYVTLEPCVMCAGAMIHSRIGRVVFGARDAKTGAAGSLMDVLHHPGMNHRVEITEGILADECAALLSDFFRMRRQEIKAQKKAQSSTDSGGSSGGSSGSETPGTSESATPESSGGSSGGSSEVEFSHEYWMRHALTLAKRARDEREVPVGAVLVLNNRVIGEGWNRAIGLHDPTAHAEIMALRQGGLVMQNYRLIDATLYVTFEPCVMCAGAMIHSRIGRVVFGVRNAKTGAAGSLMDVLHHPGMNHRVEITEGILADECAALLCRFFRMPRRVFNAQKKAQSSTDSGGSSGGSSGSETPGTSESATPESSGGSSGGSDKKYSIGLAIGTNSVGWAVITDEYKVPSKKFKVLGNTDRHSIKKNLIGALLFDSGETAEATRLKRTARRRYTRRKNRICYLQEIFSNEMAKVDDSFFHRLEESFLVEEDKKHERHPIFGNIVDEVAYHEKYPTIYHLRKKLVDSTDKADLRLIYLALAHMIKFRGHFLIEGDLNPDNSDVDKLFIQLVQTYNQLFEENPINASGVDAKAILSARLSKSRRLENLIAQLPGEKKNGLFGNLIALSLGLTPNFKSNFDLAEDAKLQLSKDTYDDDLDNLLAQIGDQYADLFLAAKNLSDAILLSDILRVNTEITKAPLSASMIKRYDEHHQDLTLLKALVRQQLPEKYKEIFFDQSKNGYAGYIDGGASQEEFYKFIKPILEKMDGTEELLVKLNREDLLRKQRTFDNGSIPHQIHLGELHAILRRQEDFYPFLKDNREKIEKILTFRIPYYVGPLARGNSRFAWMTRKSEETITPWNFEEVVDKGASAQSFIERMTNFDKNLPNEKVLPKHSLLYEYFTVYNELTKVKYVTEGMRKPAFLSGEQKKAIVDLLFKTNRKVTVKQLKEDYFKKIECFDSVEISGVEDRFNASLGTYHDLLKIIKDKDFLDNEENEDILEDIVLTLTLFEDREMIEERLKTYAHLFDDKVMKQLKRRRYTGWGRLSRKLINGIRDKQSGKTILDFLKSDGFANRNFMQLIHDDSLTFKEDIQKAQVSGQGDSLHEHIANLAGSPAIKKGILQTVKVVDELVKVMGRHKPENIVIEMARENQTTQKGQKNSRERMKRIEEGIKELGSQILKEHPVENTQLQNEKLYLYYLQNGRDMYVDQELDINRLSDYDVDHIVPQSFLKDDSIDNKVLTRSDKNRGKSDNVPSEEVVKKMKNYWRQLLNAKLITQRKFDNLTKAERGGLSELDKAGFIKRQLVETRQITKHVAQILDSRMNTKYDENDKLIREVKVITLKSKLVSDFRKDFQFYKVREINNYHHAHDAYLNAVVGTALIKKYPKLESEFVYGDYKVYDVRKMIAKSEQEIGKATAKYFFYSNIMNFFKTEITLANGEIRKRPLIETNGETGEIVWDKGRDFATVRKVLSMPQVNIVKKTEVQTGGFSKESILPKRNSDKLIARKKDWDPKKYGGFDSPTVAYSVLVVAKVEKGKSKKLKSVKELLGITIMERSSFEKNPIDFLEAKGYKEVKKDLIIKLPKYSLFELENGRKRMLASAGELQKGNELALPSKYVNFLYLASHYEKLKGSPEDNEQKQLFVEQHKHYLDEIIEQISEFSKRVILADANLDKVLSAYNKHRDKPIREQAENIIHLFTLTNLGAPAAFKYFDTTIDRKRYTSTKEVLDATLIHQSITGLYETRIDLSQLGGDEGADKRTADGSEFESPKKKRKV

SEQ ID NO: 335 - protein, 1588 aa, synthetic construct
  REGION 1..1588: note = ABE8.13-m polypeptide sequence
  REGION 1..167: note = MISC_FEATURE - Adenosine deaminase sequence
  REGION 168..199: note = MISC_FEATURE - Linker sequence
  REGION 200..1566: note = MISC_FEATURE - Sequence derived from Cas9
  REGION 1567..1588: note = MISC_FEATURE - Bipartite nuclear localization sequence
MSEVEFSHEYWMRHALTLAKRARDEREVPVGAVLVLNNRVIGEGWNRAIGLHDPTAHAEIMALRQGGLVMQNYRLYDATLYVTFEPCVMCAGAMIHSRIGRVVFGVRNAKTGAAGSLMDVLHHPGMNHRVEITEGILADECAALLCRFFRMPRRVFNAQKKAQSSTDSGGSSGGSSGSETPGTSESATPESSGGSSGGSDKKYSIGLAIGTNSVGWAVITDEYKVPSKKFKVLGNTDRHSIKKNLIGALLFDSGETAEATRLKRTARRRYTRRKNRICYLQEIFSNEMAKVDDSFFHRLEESFLVEEDKKHERHPIFGNIVDEVAYHEKYPTIYHLRKKLVDSTDKADLRLIYLALAHMIKFRGHFLIEGDLNPDNSDVDKLFIQLVQTYNQLFEENPINASGVDAKAILSARLSKSRRLENLIAQLPGEKKNGLFGNLIALSLGLTPNFKSNFDLAEDAKLQLSKDTYDDDLDNLLAQIGDQYADLFLAAKNLSDAILLSDILRVNTEITKAPLSASMIKRYDEHHQDLTLLKALVRQQLPEKYKEIFFDQSKNGYAGYIDGGASQEEFYKFIKPILEKMDGTEELLVKLNREDLLRKQRTFDNGSIPHQIHLGELHAILRRQEDFYPFLKDNREKIEKILTFRIPYYVGPLARGNSRFAWMTRKSEETITPWNFEEVVDKGASAQSFIERMTNFDKNLPNEKVLPKHSLLYEYFTVYNELTKVKYVTEGMRKPAFLSGEQKKAIVDLLFKTNRKVTVKQLKEDYFKKIECFDSVEISGVEDRFNASLGTYHDLLKIIKDKDFLDNEENEDILEDIVLTLTLFEDREMIEERLKTYAHLFDDKVMKQLKRRRYTGWGRLSRKLINGIRDKQSGKTILDFLKSDGFANRNFMQLIHDDSLTFKEDIQKAQVSGQGDSLHEHIANLAGSPAIKKGILQTVKVVDELVKVMGRHKPENIVIEMARENQTTQKGQKNSRERMKRIEEGIKELGSQILKEHPVENTQLQNEKLYLYYLQNGRDMYVDQELDINRLSDYDVDHIVPQSFLKDDSIDNKVLTRSDKNRGKSDNVPSEEVVKKMKNYWRQLLNAKLITQRKFDNLTKAERGGLSELDKAGFIKRQLVETRQITKHVAQILDSRMNTKYDENDKLIREVKVITLKSKLVSDFRKDFQFYKVREINNYHHAHDAYLNAVVGTALIKKYPKLESEFVYGDYKVYDVRKMIAKSEQEIGKATAKYFFYSNIMNFFKTEITLANGEIRKRPLIETNGETGEIVWDKGRDFATVRKVLSMPQVNIVKKTEVQTGGFSKESILPKRNSDKLIARKKDWDPKKYGGFDSPTVAYSVLVVAKVEKGKSKKLKSVKELLGITIMERSSFEKNPIDFLEAKGYKEVKKDLIIKLPKYSLFELENGRKRMLASAGELQKGNELALPSKYVNFLYLASHYEKLKGSPEDNEQKQLFVEQHKHYLDEIIEQISEFSKRVILADANLDKVLSAYNKHRDKPIREQAENIIHLFTLTNLGAPAAFKYFDTTIDRKRYTSTKEVLDATLIHQSITGLYETRIDLSQLGGDEGADKRTADGSEFESPKKKRKV

SEQ ID NO: 336 - protein, 1786 aa, synthetic construct
  REGION 1..1786: note = ABE8.13-d polypeptide sequence
  REGION 1..167: note = MISC_FEATURE - Adenosine deaminase sequence
  REGION 168..199: note = MISC_FEATURE - Linker sequence
  REGION 200..365: note = MISC_FEATURE - Adenosine deaminase sequence
  REGION 366..397: note = MISC_FEATURE - Linker sequence
  REGION 398..1764: note = MISC_FEATURE - Sequence derived from Cas9
  REGION 1765..1786: note = MISC_FEATURE - Bipartite nuclear localization sequence
MSEVEFSHEYWMRHALTLAKRAWDEREVPVGAVLVHNNRVIGEGWNRPIGRHDPTAHAEIMALRQGGLVMQNYRLIDATLYVTLEPCVMCAGAMIHSRIGRVVFGARDAKTGAAGSLMDVLHHPGMNHRVEITEGILADECAALLSDFFRMRRQEIKAQKKAQSSTDSGGSSGGSSGSETPGTSESATPESSGGSSGGSSEVEFSHEYWMRHALTLAKRARDEREVPVGAVLVLNNRVIGEGWNRAIGLHDPTAHAEIMALRQGGLVMQNYRLYDATLYVTFEPCVMCAGAMIHSRIGRVVFGVRNAKTGAAGSLMDVLHHPGMNHRVEITEGILADECAALLCRFFRMPRRVFNAQKKAQSSTDSGGSSGGSSGSETPGTSESATPESSGGSSGGSDKKYSIGLAIGTNSVGWAVITDEYKVPSKKFKVLGNTDRHSIKKNLIGALLFDSGETAEATRLKRTARRRYTRRKNRICYLQEIFSNEMAKVDDSFFHRLEESFLVEEDKKHERHPIFGNIVDEVAYHEKYPTIYHLRKKLVDSTDKADLRLIYLALAHMIKFRGHFLIEGDLNPDNSDVDKLFIQLVQTYNQLFEENPINASGVDAKAILSARLSKSRRLENLIAQLPGEKKNGLFGNLIALSLGLTPNFKSNFDLAEDAKLQLSKDTYDDDLDNLLAQIGDQYADLFLAAKNLSDAILLSDILRVNTEITKAPLSASMIKRYDEHHQDLTLLKALVRQQLPEKYKEIFFDQSKNGYAGYIDGGASQEEFYKFIKPILEKMDGTEELLVKLNREDLLRKQRTFDNGSIPHQIHLGELHAILRRQEDFYPFLKDNREKIEKILTFRIPYYVGPLARGNSRFAWMTRKSEETITPWNFEEVVDKGASAQSFIERMTNFDKNLPNEKVLPKHSLLYEYFTVYNELTKVKYVTEGMRKPAFLSGEQKKAIVDLLFKTNRKVTVKQLKEDYFKKIECFDSVEISGVEDRFNASLGTYHDLLKIIKDKDFLDNEENEDILEDIVLTLTLFEDREMIEERLKTYAHLFDDKVMKQLKRRRYTGWGRLSRKLINGIRDKQSGKTILDFLKSDGFANRNFMQLIHDDSLTFKEDIQKAQVSGQGDSLHEHIANLAGSPAIKKGILQTVKVVDELVKVMGRHKPENIVIEMARENQTTQKGQKNSRERMKRIEEGIKELGSQILKEHPVENTQLQNEKLYLYYLQNGRDMYVDQELDINRLSDYDVDHIVPQSFLKDDSIDNKVLTRSDKNRGKSDNVPSEEVVKKMKNYWRQLLNAKLITQRKFDNLTKAERGGLSELDKAGFIKRQLVETRQITKHVAQILDSRMNTKYDENDKLIREVKVITLKSKLVSDFRKDFQFYKVREINNYHHAHDAYLNAVVGTALIKKYPKLESEFVYGDYKVYDVRKMIAKSEQEIGKATAKYFFYSNIMNFFKTEITLANGEIRKRPLIETNGETGEIVWDKGRDFATVRKVLSMPQVNIVKKTEVQTGGFSKESILPKRNSDKLIARKKDWDPKKYGGFDSPTVAYSVLVVAKVEKGKSKKLKSVKELLGITIMERSSFEKNPIDFLEAKGYKEVKKDLIIKLPKYSLFELENGRKRMLASAGELQKGNELALPSKYVNFLYLASHYEKLKGSPEDNEQKQLFVEQHKHYLDEIIEQISEFSKRVILADANLDKVLSAYNKHRDKPIREQAENIIHLFTLTNLGAPAAFKYFDTTIDRKRYTSTKEVLDATLIHQSITGLYETRIDLSQLGGDEGADKRTADGSEFESPKKKRKV

SEQ ID NO: 337 - protein, 1588 aa, synthetic construct
  REGION 1..1588: note = ABE8.17-m polypeptide sequence
  REGION 1..167: note = MISC_FEATURE - Adenosine deaminase sequence
  REGION 168..199: note = MISC_FEATURE - Linker sequence
  REGION 200..1566: note = MISC_FEATURE - Sequence derived from Cas9
  REGION 1567..1588: note = MISC_FEATURE - Bipartite nuclear localization sequence
MSEVEFSHEYWMRHALTLAKRARDEREVPVGAVLVLNNRVIGEGWNRAIGLHDPTAHAEIMALRQGGLVMQNYRLIDATLYSTFEPCVMCAGAMIHSRIGRVVFGVRNAKTGAAGSLMDVLHYPGMNHRVEITEGILADECAALLCYFFRMPRRVFNAQKKAQSSTDSGGSSGGSSGSETPGTSESATPESSGGSSGGSDKKYSIGLAIGTNSVGWAVITDEYKVPSKKFKVLGNTDRHSIKKNLIGALLFDSGETAEATRLKRTARRRYTRRKNRICYLQEIFSNEMAKVDDSFFHRLEESFLVEEDKKHERHPIFGNIVDEVAYHEKYPTIYHLRKKLVDSTDKADLRLIYLALAHMIKFRGHFLIEGDLNPDNSDVDKLFIQLVQTYNQLFEENPINASGVDAKAILSARLSKSRRLENLIAQLPGEKKNGLFGNLIALSLGLTPNFKSNFDLAEDAKLQLSKDTYDDDLDNLLAQIGDQYADLFLAAKNLSDAILLSDILRVNTEITKAPLSASMIKRYDEHHQDLTLLKALVRQQLPEKYKEIFFDQSKNGYAGYIDGGASQEEFYKFIKPILEKMDGTEELLVKLNREDLLRKQRTFDNGSIPHQIHLGELHAILRRQEDFYPFLKDNREKIEKILTFRIPYYVGPLARGNSRFAWMTRKSEETITPWNFEEVVDKGASAQSFIERMTNFDKNLPNEKVLPKHSLLYEYFTVYNELTKVKYVTEGMRKPAFLSGEQKKAIVDLLFKTNRKVTVKQLKEDYFKKIECFDSVEISGVEDRFNASLGTYHDLLKIIKDKDFLDNEENEDILEDIVLTLTLFEDREMIEERLKTYAHLFDDKVMKQLKRRRYTGWGRLSRKLINGIRDKQSGKTILDFLKSDGFANRNFMQLIHDDSLTFKEDIQKAQVSGQGDSLHEHIANLAGSPAIKKGILQTVKVVDELVKVMGRHKPENIVIEMARENQTTQKGQKNSRERMKRIEEGIKELGSQILKEHPVENTQLQNEKLYLYYLQNGRDMYVDQELDINRLSDYDVDHIVPQSFLKDDSIDNKVLTRSDKNRGKSDNVPSEEVVKKMKNYWRQLLNAKLITQRKFDNLTKAERGGLSELDKAGFIKRQLVETRQITKHVAQILDSRMNTKYDENDKLIREVKVITLKSKLVSDFRKDFQFYKVREINNYHHAHDAYLNAVVGTALIKKYPKLESEFVYGDYKVYDVRKMIAKSEQEIGKATAKYFFYSNIMNFFKTEITLANGEIRKRPLIETNGETGEIVWDKGRDFATVRKVLSMPQVNIVKKTEVQTGGFSKESILPKRNSDKLIARKKDWDPKKYGGFDSPTVAYSVLVVAKVEKGKSKKLKSVKELLGITIMERSSFEKNPIDFLEAKGYKEVKKDLIIKLPKYSLFELENGRKRMLASAGELQKGNELALPSKYVNFLYLASHYEKLKGSPEDNEQKQLFVEQHKHYLDEIIEQISEFSKRVILADANLDKVLSAYNKHRDKPIREQAENIIHLFTLTNLGAPAAFKYFDTTIDRKRYTSTKEVLDATLIHQSITGLYETRIDLSQLGGDEGADKRTADGSEFESPKKKRKV

SEQ ID NO: 338 - protein, 1786 aa, synthetic construct
  REGION 1..1786: note = ABE8.17-d polypeptide sequence
  REGION 1..167: note = MISC_FEATURE - Adenosine deaminase sequence
  REGION 168..199: note = MISC_FEATURE - Linker sequence
  REGION 200..365: note = MISC_FEATURE - Adenosine deaminase sequence
  REGION 366..397: note = MISC_FEATURE - Linker sequence
  REGION 398..1764: note = MISC_FEATURE - Sequence derived from Cas9
  REGION 1765..1786: note = MISC_FEATURE - Bipartite nuclear localization sequence
MSEVEFSHEYWMRHALTLAKRAWDEREVPVGAVLVHNNRVIGEGWNRPIGRHDPTAHAEIMALRQGGLVMQNYRLIDATLYVTLEPCVMCAGAMIHSRIGRVVFGARDAKTGAAGSLMDVLHHPGMNHRVEITEGILADECAALLSDFFRMRRQEIKAQKKAQSSTDSGGSSGGSSGSETPGTSESATPESSGGSSGGSSEVEFSHEYWMRHALTLAKRARDEREVPVGAVLVLNNRVIGEGWNRAIGLHDPTAHAEIMALRQGGLVMQNYRLIDATLYSTFEPCVMCAGAMIHSRIGRVVFGVRNAKTGAAGSLMDVLHYPGMNHRVEITEGILADECAALLCYFFRMPRRVFNAQKKAQSSTDSGGSSGGSSGSETPGTSESATPESSGGSSGGSDKKYSIGLAIGTNSVGWAVITDEYKVPSKKFKVLGNTDRHSIKKNLIGALLFDSGETAEATRLKRTARRRYTRRKNRICYLQEIFSNEMAKVDDSFFHRLEESFLVEEDKKHERHPIFGNIVDEVAYHEKYPTIYHLRKKLVDSTDKADLRLIYLALAHMIKFRGHFLIEGDLNPDNSDVDKLFIQLVQTYNQLFEENPINASGVDAKAILSARLSKSRRLENLIAQLPGEKKNGLFGNLIALSLGLTPNFKSNFDLAEDAKLQLSKDTYDDDLDNLLAQIGDQYADLFLAAKNLSDAILLSDILRVNTEITKAPLSASMIKRYDEHHQDLTLLKALVRQQLPEKYKEIFFDQSKNGYAGYIDGGASQEEFYKFIKPILEKMDGTEELLVKLNREDLLRKQRTFDNGSIPHQIHLGELHAILRRQEDFYPFLKDNREKIEKILTFRIPYYVGPLARGNSRFAWMTRKSEETITPWNFEEVVDKGASAQSFIERMTNFDKNLPNEKVLPKHSLLYEYFTVYNELTKVKYVTEGMRKPAFLSGEQKKAIVDLLFKTNRKVTVKQLKEDYFKKIECFDSVEISGVEDRFNASLGTYHDLLKIIKDKDFLDNEENEDILEDIVLTLTLFEDREMIEERLKTYAHLFDDKVMKQLKRRRYTGWGRLSRKLINGIRDKQSGKTILDFLKSDGFANRNFMQLIHDDSLTFKEDIQKAQVSGQGDSLHEHIANLAGSPAIKKGILQTVKVVDELVKVMGRHKPENIVIEMARENQTTQKGQKNSRERMKRIEEGIKELGSQILKEHPVENTQLQNEKLYLYYLQNGRDMYVDQELDINRLSDYDVDHIVPQSFLKDDSIDNKVLTRSDKNRGKSDNVPSEEVVKKMKNYWRQLLNAKLITQRKFDNLTKAERGGLSELDKAGFIKRQLVETRQITKHVAQILDSRMNTKYDENDKLIREVKVITLKSKLVSDFRKDFQFYKVREINNYHHAHDAYLNAVVGTALIKKYPKLESEFVYGDYKVYDVRKMIAKSEQEIGKATAKYFFYSNIMNFFKTEITLANGEIRKRPLIETNGETGEIVWDKGRDFATVRKVLSMPQVNIVKKTEVQTGGFSKESILPKRNSDKLIARKKDWDPKKYGGFDSPTVAYSVLVVAKVEKGKSKKLKSVKELLGITIMERSSFEKNPIDFLEAKGYKEVKKDLIIKLPKYSLFELENGRKRMLASAGELQKGNELALPSKYVNFLYLASHYEKLKGSPEDNEQKQLFVEQHKHYLDEIIEQISEFSKRVILADANLDKVLSAYNKHRDKPIREQAENIIHLFTLTNLGAPAAFKYFDTTIDRKRYTSTKEVLDATLIHQSITGLYETRIDLSQLGGDEGADKRTADGSEFESPKKKRKV

SEQ ID NO: 339 - protein, 1588 aa, synthetic construct
  REGION 1..1588: note = ABE8.20-m polypeptide sequence
  REGION 1..167: note = MISC_FEATURE - Adenosine deaminase sequence
  REGION 168..199: note = MISC_FEATURE - Linker sequence
  REGION 200..1566: note = MISC_FEATURE - Sequence derived from Cas9
  REGION 1567..1588: note = MISC_FEATURE - Bipartite nuclear localization sequence
MSEVEFSHEYWMRHALTLAKRARDEREVPVGAVLVLNNRVIGEGWNRAIGLHDPTAHAEIMALRQGGLVMQNYRLYDATLYSTFEPCVMCAGAMIHSRIGRVVFGVRNAKTGAAGSLMDVLHHPGMNHRVEITEGILADECAALLCRFFRMPRRVFNAQKKAQSSTDSGGSSGGSSGSETPGTSESATPESSGGSSGGSDKKYSIGLAIGTNSVGWAVITDEYKVPSKKFKVLGNTDRHSIKKNLIGALLFDSGETAEATRLKRTARRRYTRRKNRICYLQEIFSNEMAKVDDSFFHRLEESFLVEEDKKHERHPIFGNIVDEVAYHEKYPTIYHLRKKLVDSTDKADLRLIYLALAHMIKFRGHFLIEGDLNPDNSDVDKLFIQLVQTYNQLFEENPINASGVDAKAILSARLSKSRRLENLIAQLPGEKKNGLFGNLIALSLGLTPNFKSNFDLAEDAKLQLSKDTYDDDLDNLLAQIGDQYADLFLAAKNLSDAILLSDILRVNTEITKAPLSASMIKRYDEHHQDLTLLKALVRQQLPEKYKEIFFDQSKNGYAGYIDGGASQEEFYKFIKPILEKMDGTEELLVKLNREDLLRKQRTFDNGSIPHQIHLGELHAILRRQEDFYPFLKDNREKIEKILTFRIPYYVGPLARGNSRFAWMTRKSEETITPWNFEEVVDKGASAQSFIERMTNFDKNLPNEKVLPKHSLLYEYFTVYNELTKVKYVTEGMRKPAFLSGEQKKAIVDLLFKTNRKVTVKQLKEDYFKKIECFDSVEISGVEDRFNASLGTYHDLLKIIKDKDFLDNEENEDILEDIVLTLTLFEDREMIEERLKTYAHLFDDKVMKQLKRRRYTGWGRLSRKLINGIRDKQSGKTILDFLKSDGFANRNFMQLIHDDSLTFKEDIQKAQVSGQGDSLHEHIANLAGSPAIKKGILQTVKVVDELVKVMGRHKPENIVIEMARENQTTQKGQKNSRERMKRIEEGIKELGSQILKEHPVENTQLQNEKLYLYYLQNGRDMYVDQELDINRLSDYDVDHIVPQSFLKDDSIDNKVLTRSDKNRGKSDNVPSEEVVKKMKNYWRQLLNAKLITQRKFDNLTKAERGGLSELDKAGFIKRQLVETRQITKHVAQILDSRMNTKYDENDKLIREVKVITLKSKLVSDFRKDFQFYKVREINNYHHAHDAYLNAVVGTALIKKYPKLESEFVYGDYKVYDVRKMIAKSEQEIGKATAKYFFYSNIMNFFKTEITLANGEIRKRPLIETNGETGEIVWDKGRDFATVRKVLSMPQVNIVKKTEVQTGGFSKESILPKRNSDKLIARKKDWDPKKYGGFDSPTVAYSVLVVAKVEKGKSKKLKSVKELLGITIMERSSFEKNPIDFLEAKGYKEVKKDLIIKLPKYSLFELENGRKRMLASAGELQKGNELALPSKYVNFLYLASHYEKLKGSPEDNEQKQLFVEQHKHYLDEIIEQISEFSKRVILADANLDKVLSAYNKHRDKPIREQAENIIHLFTLTNLGAPAAFKYFDTTIDRKRYTSTKEVLDATLIHQSITGLYETRIDLSQLGGDEGADKRTADGSEFESPKKKRKV

SEQ ID NO: 340 - protein, 1786 aa, synthetic construct
  REGION 1..1786: note = ABE8.20-d polypeptide sequence
  REGION 1..167: note = MISC_FEATURE - Adenosine deaminase sequence
  REGION 168..199: note = MISC_FEATURE - Linker sequence
  REGION 200..365: note = MISC_FEATURE - Adenosine deaminase sequence
  REGION 366..397: note = MISC_FEATURE - Linker sequence
  REGION 398..1764: note = MISC_FEATURE - Sequence derived from Cas9
  REGION 1765..1786: note = MISC_FEATURE - Bipartite nuclear localization sequence
MSEVEFSHEYWMRHALTLAKRAWDEREVPVGAVLVHNNRVIGEGWNRPIGRHDPTAHAEIMALRQGGLVMQNYRLIDATLYVTLEPCVMCAGAMIHSRIGRVVFGARDAKTGAAGSLMDVLHHPGMNHRVEITEGILADECAALLSDFFRMRRQEIKAQKKAQSSTDSGGSSGGSSGSETPGTSESATPESSGGSSGGSSEVEFSHEYWMRHALTLAKRARDEREVPVGAVLVLNNRVIGEGWNRAIGLHDPTAHAEIMALRQGGLVMQNYRLYDATLYSTFEPCVMCAGAMIHSRIGRVVFGVRNAKTGAAGSLMDVLHHPGMNHRVEITEGILADECAALLCRFFRMPRRVFNAQKKAQSSTDSGGSSGGSSGSETPGTSESATPESSGGSSGGSDKKYSIGLAIGTNSVGWAVITDEYKVPSKKFKVLGNTDRHSIKKNLIGALLFDSGETAEATRLKRTARRRYTRRKNRICYLQEIFSNEMAKVDDSFFHRLEESFLVEEDKKHERHPIFGNIVDEVAYHEKYPTIYHLRKKLVDSTDKADLRLIYLALAHMIKFRGHFLIEGDLNPDNSDVDKLFIQLVQTYNQLFEENPINASGVDAKAILSARLSKSRRLENLIAQLPGEKKNGLFGNLIALSLGLTPNFKSNFDLAEDAKLQLSKDTYDDDLDNLLAQIGDQYADLFLAAKNLSDAILLSDILRVNTEITKAPLSASMIKRYDEHHQDLTLLKALVRQQLPEKYKEIFFDQSKNGYAGYIDGGASQEEFYKFIKPILEKMDGTEELLVKLNREDLLRKQRTFDNGSIPHQIHLGELHAILRRQEDFYPFLKDNREKIEKILTFRIPYYVGPLARGNSRFAWMTRKSEETITPWNFEEVVDKGASAQSFIERMTNFDKNLPNEKVLPKHSLLYEYFTVYNELTKVKYVTEGMRKPAFLSGEQKKAIVDLLFKTNRKVTVKQLKEDYFKKIECFDSVEISGVEDRFNASLGTYHDLLKIIKDKDFLDNEENEDILEDIVLTLTLFEDREMIEERLKTYAHLFDDKVMKQLKRRRYTGWGRLSRKLINGIRDKQSGKTILDFLKSDGFANRNFMQLIHDDSLTFKEDIQKAQVSGQGDSLHEHIANLAGSPAIKKGILQTVKVVDELVKVMGRHKPENIVIEMARENQTTQKGQKNSRERMKRIEEGIKELGSQILKEHPVENTQLQNEKLYLYYLQNGRDMYVDQELDINRLSDYDVDHIVPQSFLKDDSIDNKVLTRSDKNRGKSDNVPSEEVVKKMKNYWRQLLNAKLITQRKFDNLTKAERGGLSELDKAGFIKRQLVETRQITKHVAQILDSRMNTKYDENDKLIREVKVITLKSKLVSDFRKDFQFYKVREINNYHHAHDAYLNAVVGTALIKKYPKLESEFVYGDYKVYDVRKMIAKSEQEIGKATAKYFFYSNIMNFFKTEITLANGEIRKRPLIETNGETGEIVWDKGRDFATVRKVLSMPQVNIVKKTEVQTGGFSKESILPKRNSDKLIARKKDWDPKKYGGFDSPTVAYSVLVVAKVEKGKSKKLKSVKELLGITIMERSSFEKNPIDFLEAKGYKEVKKDLIIKLPKYSLFELENGRKRMLASAGELQKGNELALPSKYVNFLYLASHYEKLKGSPEDNEQKQLFVEQHKHYLDEIIEQISEFSKRVILADANLDKVLSAYNKHRDKPIREQAENIIHLFTLTNLGAPAAFKYFDTTIDRKRYTSTKEVLDATLIHQSITGLYETRIDLSQLGGDEGADKRTADGSEFESPKKKRKV

SEQ ID NO: 341 - protein, 1588 aa, synthetic construct
  REGION 1..1588: note = 01. monoABE8.1_bpNLS + Y147T polypeptide sequence
MSEVEFSHEYWMRHALTLAKRARDEREVPVGAVLVLNNRVIGEGWNRAIGLHDPTAHAEIMALRQGGLVMQNYRLIDATLYVTFEPCVMCAGAMIHSRIGRVVFGVRNAKTGAAGSLMDVLHYPGMNHRVEITEGILADECAALLCTFFRMPRQVFNAQKKAQSSTDSGGSSGGSSGSETPGTSESATPESSGGSSGGSDKKYSIGLAIGTNSVGWAVITDEYKVPSKKFKVLGNTDRHSIKKNLIGALLFDSGETAEATRLKRTARRRYTRRKNRICYLQEIFSNEMAKVDDSFFHRLEESFLVEEDKKHERHPIFGNIVDEVAYHEKYPTIYHLRKKLVDSTDKADLRLIYLALAHMIKFRGHFLIEGDLNPDNSDVDKLFIQLVQTYNQLFEENPINASGVDAKAILSARLSKSRRLENLIAQLPGEKKNGLFGNLIALSLGLTPNFKSNFDLAEDAKLQLSKDTYDDDLDNLLAQIGDQYADLFLAAKNLSDAILLSDILRVNTEITKAPLSASMIKRYDEHHQDLTLLKALVRQQLPEKYKEIFFDQSKNGYAGYIDGGASQEEFYKFIKPILEKMDGTEELLVKLNREDLLRKQRTFDNGSIPHQIHLGELHAILRRQEDFYPFLKDNREKIEKILTFRIPYYVGPLARGNSRFAWMTRKSEETITPWNFEEVVDKGASAQSFIERMTNFDKNLPNEKVLPKHSLLYEYFTVYNELTKVKYVTEGMRKPAFLSGEQKKAIVDLLFKTNRKVTVKQLKEDYFKKIECFDSVEISGVEDRFNASLGTYHDLLKIIKDKDFLDNEENEDILEDIVLTLTLFEDREMIEERLKTYAHLFDDKVMKQLKRRRYTGWGRLSRKLINGIRDKQSGKTILDFLKSDGFANRNFMQLIHDDSLTFKEDIQKAQVSGQGDSLHEHIANLAGSPAIKKGILQTVKVVDELVKVMGRHKPENIVIEMARENQTTQKGQKNSRERMKRIEEGIKELGSQILKEHPVENTQLQNEKLYLYYLQNGRDMYVDQELDINRLSDYDVDHIVPQSFLKDDSIDNKVLTRSDKNRGKSDNVPSEEVVKKMKNYWRQLLNAKLITQRKFDNLTKAERGGLSELDKAGFIKRQLVETRQITKHVAQILDSRMNTKYDENDKLIREVKVITLKSKLVSDFRKDFQFYKVREINNYHHAHDAYLNAVVGTALIKKYPKLESEFVYGDYKVYDVRKMIAKSEQEIGKATAKYFFYSNIMNFFKTEITLANGEIRKRPLIETNGETGEIVWDKGRDFATVRKVLSMPQVNIVKKTEVQTGGFSKESILPKRNSDKLIARKKDWDPKKYGGFVSPTVAYSVLVVAKVEKGKSKKLKSVKELLGITIMERSSFEKNPIDFLEAKGYKEVKKDLIIKLPKYSLFELENGRKRMLASARELQKGNELALPSKYVNFLYLASHYEKLKGSPEDNEQKQLFVEQHKHYLDEIIEQISEFSKRVILADANLDKVLSAYNKHRDKPIREQAENIIHLFTLTNLGAPAAFKYFDTTIDRKQYRSTKEVLDATLIHQSITGLYETRIDLSQLGGDEGADKRTADGSEFESPKKKRKV

SEQ ID NO: 342 - protein, 1588 aa, synthetic construct
  REGION 1..1588: note = 02. monoABE8.1_bpNLS + Y147R polypeptide sequence
MSEVEFSHEYWMRHALTLAKRARDEREVPVGAVLVLNNRVIGEGWNRAIGLHDPTAHAEIMALRQGGLVMQNYRLIDATLYVTFEPCVMCAGAMIHSRIGRVVFGVRNAKTGAAGSLMDVLHYPGMNHRVEITEGILADECAALLCRFFRMPRQVFNAQKKAQSSTDSGGSSGGSSGSETPGTSESATPESSGGSSGGSDKKYSIGLAIGTNSVGWAVITDEYKVPSKKFKVLGNTDRHSIKKNLIGALLFDSGETAEATRLKRTARRRYTRRKNRICYLQEIFSNEMAKVDDSFFHRLEESFLVEEDKKHERHPIFGNIVDEVAYHEKYPTIYHLRKKLVDSTDKADLRLIYLALAHMIKFRGHFLIEGDLNPDNSDVDKLFIQLVQTYNQLFEENPINASGVDAKAILSARLSKSRRLENLIAQLPGEKKNGLFGNLIALSLGLTPNFKSNFDLAEDAKLQLSKDTYDDDLDNLLAQIGDQYADLFLAAKNLSDAILLSDILRVNTEITKAPLSASMIKRYDEHHQDLTLLKALVRQQLPEKYKEIFFDQSKNGYAGYIDGGASQEEFYKFIKPILEKMDGTEELLVKLNREDLLRKQRTFDNGSIPHQIHLGELHAILRRQEDFYPFLKDNREKIEKILTFRIPYYVGPLARGNSRFAWMTRKSEETITPWNFEEVVDKGASAQSFIERMTNFDKNLPNEKVLPKHSLLYEYFTVYNELTKVKYVTEGMRKPAFLSGEQKKAIVDLLFKTNRKVTVKQLKEDYFKKIECFDSVEISGVEDRFNASLGTYHDLLKIIKDKDFLDNEENEDILEDIVLTLTLFEDREMIEERLKTYAHLFDDKVMKQLKRRRYTGWGRLSRKLINGIRDKQSGKTILDFLKSDGFANRNFMQLIHDDSLTFKEDIQKAQVSGQGDSLHEHIANLAGSPAIKKGILQTVKVVDELVKVMGRHKPENIVIEMARENQTTQKGQKNSRERMKRIEEGIKELGSQILKEHPVENTQLQNEKLYLYYLQNGRDMYVDQELDINRLSDYDVDHIVPQSFLKDDSIDNKVLTRSDKNRGKSDNVPSEEVVKKMKNYWRQLLNAKLITQRKFDNLTKAERGGLSELDKAGFIKRQLVETRQITKHVAQILDSRMNTKYDENDKLIREVKVITLKSKLVSDFRKDFQFYKVREINNYHHAHDAYLNAVVGTALIKKYPKLESEFVYGDYKVYDVRKMIAKSEQEIGKATAKYFFYSNIMNFFKTEITLANGEIRKRPLIETNGETGEIVWDKGRDFATVRKVLSMPQVNIVKKTEVQTGGFSKESILPKRNSDKLIARKKDWDPKKYGGFVSPTVAYSVLVVAKVEKGKSKKLKSVKELLGITIMERSSFEKNPIDFLEAKGYKEVKKDLIIKLPKYSLFELENGRKRMLASARELQKGNELALPSKYVNFLYLASHYEKLKGSPEDNEQKQLFVEQHKHYLDEIIEQISEFSKRVILADANLDKVLSAYNKHRDKPIREQAENIIHLFTLTNLGAPAAFKYFDTTIDRKQYRSTKEVLDATLIHQSITGLYETRIDLSQLGGDEGADKRTADGSEFESPKKKRKV

SEQ ID NO: 343 - protein, 1588 aa, synthetic construct
  REGION 1..1588: note = 03. monoABE8.1_bpNLS + Q154S polypeptide sequence
MSEVEFSHEYWMRHALTLAKRARDEREVPVGAVLVLNNRVIGEGWNRAIGLHDPTAHAEIMALRQGGLVMQNYRLIDATLYVTFEPCVMCAGAMIHSRIGRVVFGVRNAKTGAAGSLMDVLHYPGMNHRVEITEGILADECAALLCYFFRMPRSVFNAQKKAQSSTDSGGSSGGSSGSETPGTSESATPESSGGSSGGSDKKYSIGLAIGTNSVGWAVITDEYKVPSKKFKVLGNTDRHSIKKNLIGALLFDSGETAEATRLKRTARRRYTRRKNRICYLQEIFSNEMAKVDDSFFHRLEESFLVEEDKKHERHPIFGNIVDEVAYHEKYPTIYHLRKKLVDSTDKADLRLIYLALAHMIKFRGHFLIEGDLNPDNSDVDKLFIQLVQTYNQLFEENPINASGVDAKAILSARLSKSRRLENLIAQLPGEKKNGLFGNLIALSLGLTPNFKSNFDLAEDAKLQLSKDTYDDDLDNLLAQIGDQYADLFLAAKNLSDAILLSDILRVNTEITKAPLSASMIKRYDEHHQDLTLLKALVRQQLPEKYKEIFFDQSKNGYAGYIDGGASQEEFYKFIKPILEKMDGTEELLVKLNREDLLRKQRTFDNGSIPHQIHLGELHAILRRQEDFYPFLKDNREKIEKILTFRIPYYVGPLARGNSRFAWMTRKSEETITPWNFEEVVDKGASAQSFIERMTNFDKNLPNEKVLPKHSLLYEYFTVYNELTKVKYVTEGMRKPAFLSGEQKKAIVDLLFKTNRKVTVKQLKEDYFKKIECFDSVEISGVEDRFNASLGTYHDLLKIIKDKDFLDNEENEDILEDIVLTLTLFEDREMIEERLKTYAHLFDDKVMKQLKRRRYTGWGRLSRKLINGIRDKQSGKTILDFLKSDGFANRNFMQLIHDDSLTFKEDIQKAQVSGQGDSLHEHIANLAGSPAIKKGILQTVKVVDELVKVMGRHKPENIVIEMARENQTTQKGQKNSRERMKRIEEGIKELGSQILKEHPVENTQLQNEKLYLYYLQNGRDMYVDQELDINRLSDYDVDHIVPQSFLKDDSIDNKVLTRSDKNRGKSDNVPSEEVVKKMKNYWRQLLNAKLITQRKFDNLTKAERGGLSELDKAGFIKRQLVETRQITKHVAQILDSRMNTKYDENDKLIREVKVITLKSKLVSDFRKDFQFYKVREINNYHHAHDAYLNAVVGTALIKKYPKLESEFVYGDYKVYDVRKMIAKSEQEIGKATAKYFFYSNIMNFFKTEITLANGEIRKRPLIETNGETGEIVWDKGRDFATVRKVLSMPQVNIVKKTEVQTGGFSKESILPKRNSDKLIARKKDWDPKKYGGFVSPTVAYSVLVVAKVEKGKSKKLKSVKELLGITIMERSSFEKNPIDFLEAKGYKEVKKDLIIKLPKYSLFELENGRKRMLASARELQKGNELALPSKYVNFLYLASHYEKLKGSPEDNEQKQLFVEQHKHYLDEIIEQISEFSKRVILADANLDKVLSAYNKHRDKPIREQAENIIHLFTLTNLGAPAAFKYFDTTIDRKQYRSTKEVLDATLIHQSITGLYETRIDLSQLGGDEGADKRTADGSEFESPKKKRKV

SEQ ID NO: 344 - protein, 1588 aa, synthetic construct
  REGION 1..1588: note = 04. monoABE8.1_bpNLS + Y123H polypeptide sequence
MSEVEFSHEYWMRHALTLAKRARDEREVPVGAVLVLNNRVIGEGWNRAIGLHDPTAHAEIMALRQGGLVMQNYRLIDATLYVTFEPCVMCAGAMIHSRIGRVVFGVRNAKTGAAGSLMDVLHHPGMNHRVEITEGILADECAALLCYFFRMPRQVFNAQKKAQSSTDSGGSSGGSSGSETPGTSESATPESSGGSSGGSDKKYSIGLAIGTNSVGWAVITDEYKVPSKKFKVLGNTDRHSIKKNLIGALLFDSGETAEATRLKRTARRRYTRRKNRICYLQEIFSNEMAKVDDSFFHRLEESFLVEEDKKHERHPIFGNIVDEVAYHEKYPTIYHLRKKLVDSTDKADLRLIYLALAHMIKFRGHFLIEGDLNPDNSDVDKLFIQLVQTYNQLFEENPINASGVDAKAILSARLSKSRRLENLIAQLPGEKKNGLFGNLIALSLGLTPNFKSNFDLAEDAKLQLSKDTYDDDLDNLLAQIGDQYADLFLAAKNLSDAILLSDILRVNTEITKAPLSASMIKRYDEHHQDLTLLKALVRQQLPEKYKEIFFDQSKNGYAGYIDGGASQEEFYKFIKPILEKMDGTEELLVKLNREDLLRKQRTFDNGSIPHQIHLGELHAILRRQEDFYPFLKDNREKIEKILTFRIPYYVGPLARGNSRFAWMTRKSEETITPWNFEEVVDKGASAQSFIERMTNFDKNLPNEKVLPKHSLLYEYFTVYNELTKVKYVTEGMRKPAFLSGEQKKAIVDLLFKTNRKVTVKQLKEDYFKKIECFDSVEISGVEDRFNASLGTYHDLLKIIKDKDFLDNEENEDILEDIVLTLTLFEDREMIEERLKTYAHLFDDKVMKQLKRRRYTGWGRLSRKLINGIRDKQSGKTILDFLKSDGFANRNFMQLIHDDSLTFKEDIQKAQVSGQGDSLHEHIANLAGSPAIKKGILQTVKVVDELVKVMGRHKPENIVIEMARENQTTQKGQKNSRERMKRIEEGIKELGSQILKEHPVENTQLQNEKLYLYYLQNGRDMYVDQELDINRLSDYDVDHIVPQSFLKDDSIDNKVLTRSDKNRGKSDNVPSEEVVKKMKNYWRQLLNAKLITQRKFDNLTKAERGGLSELDKAGFIKRQLVETRQITKHVAQILDSRMNTKYDENDKLIREVKVITLKSKLVSDFRKDFQFYKVREINNYHHAHDAYLNAVVGTALIKKYPKLESEFVYGDYKVYDVRKMIAKSEQEIGKATAKYFFYSNIMNFFKTEITLANGEIRKRPLIETNGETGEIVWDKGRDFATVRKVLSMPQVNIVKKTEVQTGGFSKESILPKRNSDKLIARKKDWDPKKYGGFVSPTVAYSVLVVAKVEKGKSKKLKSVKELLGITIMERSSFEKNPIDFLEAKGYKEVKKDLIIKLPKYSLFELENGRKRMLASARELQKGNELALPSKYVNFLYLASHYEKLKGSPEDNEQKQLFVEQHKHYLDEIIEQISEFSKRVILADANLDKVLSAYNKHRDKPIREQAENIIHLFTLTNLGAPAAFKYFDTTIDRKQYRSTKEVLDATLIHQSITGLYETRIDLSQLGGDEGADKRTADGSEFESPKKKRKV

SEQ ID NO: 345 - protein, 1588 aa, synthetic construct
  REGION 1..1588: note = 05. monoABE8.1_bpNLS + V82S polypeptide sequence
MSEVEFSHEYWMRHALTLAKRARDEREVPVGAVLVLNNRVIGEGWNRAIGLHDPTAHAEIMALRQGGLVMQNYRLIDATLYSTFEPCVMCAGAMIHSRIGRVVFGVRNAKTGAAGSLMDVLHYPGMNHRVEITEGILADECAALLCYFFRMPRQVFNAQKKAQSSTDSGGSSGGSSGSETPGTSESATPESSGGSSGGSDKKYSIGLAIGTNSVGWAVITDEYKVPSKKFKVLGNTDRHSIKKNLIGALLFDSGETAEATRLKRTARRRYTRRKNRICYLQEIFSNEMAKVDDSFFHRLEESFLVEEDKKHERHPIFGNIVDEVAYHEKYPTIYHLRKKLVDSTDKADLRLIYLALAHMIKFRGHFLIEGDLNPDNSDVDKLFIQLVQTYNQLFEENPINASGVDAKAILSARLSKSRRLENLIAQLPGEKKNGLFGNLIALSLGLTPNFKSNFDLAEDAKLQLSKDTYDDDLDNLLAQIGDQYADLFLAAKNLSDAILLSDILRVNTEITKAPLSASMIKRYDEHHQDLTLLKALVRQQLPEKYKEIFFDQSKNGYAGYIDGGASQEEFYKFIKPILEKMDGTEELLVKLNREDLLRKQRTFDNGSIPHQIHLGELHAILRRQEDFYPFLKDNREKIEKILTFRIPYYVGPLARGNSRFAWMTRKSEETITPWNFEEVVDKGASAQSFIERMTNFDKNLPNEKVLPKHSLLYEYFTVYNELTKVKYVTEGMRKPAFLSGEQKKAIVDLLFKTNRKVTVKQLKEDYFKKIECFDSVEISGVEDRFNASLGTYHDLLKIIKDKDFLDNEENEDILEDIVLTLTLFEDREMIEERLKTYAHLFDDKVMKQLKRRRYTGWGRLSRKLINGIRDKQSGKTILDFLKSDGFANRNFMQLIHDDSLTFKEDIQKAQVSGQGDSLHEHIANLAGSPAIKKGILQTVKVVDELVKVMGRHKPENIVIEMARENQTTQKGQKNSRERMKRIEEGIKELGSQILKEHPVENTQLQNEKLYLYYLQNGRDMYVDQELDINRLSDYDVDHIVPQSFLKDDSIDNKVLTRSDKNRGKSDNVPSEEVVKKMKNYWRQLLNAKLITQRKFDNLTKAERGGLSELDKAGFIKRQLVETRQITKHVAQILDSRMNTKYDENDKLIREVKVITLKSKLVSDFRKDFQFYKVREINNYHHAHDAYLNAVVGTALIKKYPKLESEFVYGDYKVYDVRKMIAKSEQEIGKATAKYFFYSNIMNFFKTEITLANGEIRKRPLIETNGETGEIVWDKGRDFATVRKVLSMPQVNIVKKTEVQTGGFSKESILPKRNSDKLIARKKDWDPKKYGGFVSPTVAYSVLVVAKVEKGKSKKLKSVKELLGITIMERSSFEKNPIDFLEAKGYKEVKKDLIIKLPKYSLFELENGRKRMLASARELQKGNELALPSKYVNFLYLASHYEKLKGSPEDNEQKQLFVEQHKHYLDEIIEQISEFSKRVILADANLDKVLSAYNKHRDKPIREQAENIIHLFTLTNLGAPAAFKYFDTTIDRKQYRSTKEVLDATLIHQSITGLYETRIDLSQLGGDEGADKRTADGSEFESPKKKRKV

SEQ ID NO: 346 - protein, 1588 aa, synthetic construct
  REGION 1..1588: note = 06. monoABE8.1_bpNLS + T166R polypeptide sequence
MSEVEFSHEYWMRHALTLAKRARDEREVPVGAVLVLNNRVIGEGWNRAIGLHDPTAHAEIMALRQGGLVMQNYRLIDATLYVTFEPCVMCAGAMIHSRIGRVVFGVRNAKTGAAGSLMDVLHYPGMNHRVEITEGILADECAALLCYFFRMPRQVFNAQKKAQSSRDSGGSSGGSSGSETPGTSESATPESSGGSSGGSDKKYSIGLAIGTNSVGWAVITDEYKVPSKKFKVLGNTDRHSIKKNLIGALLFDSGETAEATRLKRTARRRYTRRKNRICYLQEIFSNEMAKVDDSFFHRLEESFLVEEDKKHERHPIFGNIVDEVAYHEKYPTIYHLRKKLVDSTDKADLRLIYLALAHMIKFRGHFLIEGDLNPDNSDVDKLFIQLVQTYNQLFEENPINASGVDAKAILSARLSKSRRLENLIAQLPGEKKNGLFGNLIALSLGLTPNFKSNFDLAEDAKLQLSKDTYDDDLDNLLAQIGDQYADLFLAAKNLSDAILLSDILRVNTEITKAPLSASMIKRYDEHHQDLTLLKALVRQQLPEKYKEIFFDQSKNGYAGYIDGGASQEEFYKFIKPILEKMDGTEELLVKLNREDLLRKQRTFDNGSIPHQIHLGELHAILRRQEDFYPFLKDNREKIEKILTFRIPYYVGPLARGNSRFAWMTRKSEETITPWNFEEVVDKGASAQSFIERMTNFDKNLPNEKVLPKHSLLYEYFTVYNELTKVKYVTEGMRKPAFLSGEQKKAIVDLLFKTNRKVTVKQLKEDYFKKIECFDSVEISGVEDRFNASLGTYHDLLKIIKDKDFLDNEENEDILEDIVLTLTLFEDREMIEERLKTYAHLFDDKVMKQLKRRRYTGWGRLSRKLINGIRDKQSGKTILDFLKSDGFANRNFMQLIHDDSLTFKEDIQKAQVSGQGDSLHEHIANLAGSPAIKKGILQTVKVVDELVKVMGRHKPENIVIEMARENQTTQKGQKNSRERMKRIEEGIKELGSQILKEHPVENTQLQNEKLYLYYLQNGRDMYVDQELDINRLSDYDVDHIVPQSFLKDDSIDNKVLTRSDKNRGKSDNVPSEEVVKKMKNYWRQLLNAKLITQRKFDNLTKAERGGLSELDKAGFIKRQLVETRQITKHVAQILDSRMNTKYDENDKLIREVKVITLKSKLVSDFRKDFQFYKVREINNYHHAHDAYLNAVVGTALIKKYPKLESEFVYGDYKVYDVRKMIAKSEQEIGKATAKYFFYSNIMNFFKTEITLANGEIRKRPLIETNGETGEIVWDKGRDFATVRKVLSMPQVNIVKKTEVQTGGFSKESILPKRNSDKLIARKKDWDPKKYGGFVSPTVAYSVLVVAKVEKGKSKKLKSVKELLGITIMERSSFEKNPIDFLEAKGYKEVKKDLIIKLPKYSLFELENGRKRMLASARELQKGNELALPSKYVNFLYLASHYEKLKGSPEDNEQKQLFVEQHKHYLDEIIEQISEFSKRVILADANLDKVLSAYNKHRDKPIREQAENIIHLFTLTNLGAPAAFKYFDTTIDRKQYRSTKEVLDATLIHQSITGLYETRIDLSQLGGDEGADKRTADGSEFESPKKKRKV

SEQ ID NO: 347 - protein, 1588 aa, synthetic construct
  REGION 1..1588: note = 07. monoABE8.1_bpNLS + Q154R polypeptide sequence
MSEVEFSHEYWMRHALTLAKRARDEREVPVGAVLVLNNRVIGEGWNRAIGLHDPTAHAEIMALRQGGLVMQNYRLIDATLYVTFEPCVMCAGAMIHSRIGRVVFGVRNAKTGAAGSLMDVLHYPGMNHRVEITEGILADECAALLCYFFRMPRRVFNAQKKAQSSTDSGGSSGGSSGSETPGTSESATPESSGGSSGGSDKKYSIGLAIGTNSVGWAVITDEYKVPSKKFKVLGNTDRHSIKKNLIGALLFDSGETAEATRLKRTARRRYTRRKNRICYLQEIFSNEMAKVDDSFFHRLEESFLVEEDKKHERHPIFGNIVDEVAYHEKYPTIYHLRKKLVDSTDKADLRLIYLALAHMIKFRGHFLIEGDLNPDNSDVDKLFIQLVQTYNQLFEENPINASGVDAKAILSARLSKSRRLENLIAQLPGEKKNGLFGNLIALSLGLTPNFKSNFDLAEDAKLQLSKDTYDDDLDNLLAQIGDQYADLFLAAKNLSDAILLSDILRVNTEITKAPLSASMIKRYDEHHQDLTLLKALVRQQLPEKYKEIFFDQSKNGYAGYIDGGASQEEFYKFIKPILEKMDGTEELLVKLNREDLLRKQRTFDNGSIPHQIHLGELHAILRRQEDFYPFLKDNREKIEKILTFRIPYYVGPLARGNSRFAWMTRKSEETITPWNFEEVVDKGASAQSFIERMTNFDKNLPNEKVLPKHSLLYEYFTVYNELTKVKYVTEGMRKPAFLSGEQKKAIVDLLFKTNRKVTVKQLKEDYFKKIECFDSVEISGVEDRFNASLGTYHDLLKIIKDKDFLDNEENEDILEDIVLTLTLFEDREMIEERLKTYAHLFDDKVMKQLKRRRYTGWGRLSRKLINGIRDKQSGKTILDFLKSDGFANRNFMQLIHDDSLTFKEDIQKAQVSGQGDSLHEHIANLAGSPAIKKGILQTVKVVDELVKVMGRHKPENIVIEMARENQTTQKGQKNSRERMKRIEEGIKELGSQILKEHPVENTQLQNEKLYLYYLQNGRDMYVDQELDINRLSDYDVDHIVPQSFLKDDSIDNKVLTRSDKNRGKSDNVPSEEVVKKMKNYWRQLLNAKLITQRKFDNLTKAERGGLSELDKAGFIKRQLVETRQITKHVAQILDSRMNTKYDENDKLIREVKVITLKSKLVSDFRKDFQFYKVREINNYHHAHDAYLNAVVGTALIKKYPKLESEFVYGDYKVYDVRKMIAKSEQEIGKATAKYFFYSNIMNFFKTEITLANGEIRKRPLIETNGETGEIVWDKGRDFATVRKVLSMPQVNIVKKTEVQTGGFSKESILPKRNSDKLIARKKDWDPKKYGGFVSPTVAYSVLVVAKVEKGKSKKLKSVKELLGITIMERSSFEKNPIDFLEAKGYKEVKKDLIIKLPKYSLFELENGRKRMLASARELQKGNELALPSKYVNFLYLASHYEKLKGSPEDNEQKQLFVEQHKHYLDEIIEQISEFSKRVILADANLDKVLSAYNKHRDKPIREQAENIIHLFTLTNLGAPAAFKYFDTTIDRKQYRSTKEVLDATLIHQSITGLYETRIDLSQLGGDEGADKRTADGSEFESPKKKRKV

SEQ ID NO: 348 - protein, 1588 aa, synthetic construct
  REGION 1..1588: note = 08. monoABE8.1_bpNLS +Y147R_Q154R_Y123H polypeptide sequence
MSEVEFSHEYWMRHALTLAKRARDEREVPVGAVLVLNNRVIGEGWNRAIGLHDPTAHAEIMALRQGGLVMQNYRLIDATLYVTFEPCVMCAGAMIHSRIGRVVFGVRNAKTGAAGSLMDVLHHPGMNHRVEITEGILADECAALLCRFFRMPRRVFNAQKKAQSSTDSGGSSGGSSGSETPGTSESATPESSGGSSGGSDKKYSIGLAIGTNSVGWAVITDEYKVPSKKFKVLGNTDRHSIKKNLIGALLFDSGETAEATRLKRTARRRYTRRKNRICYLQEIFSNEMAKVDDSFFHRLEESFLVEEDKKHERHPIFGNIVDEVAYHEKYPTIYHLRKKLVDSTDKADLRLIYLALAHMIKFRGHFLIEGDLNPDNSDVDKLFIQLVQTYNQLFEENPINASGVDAKAILSARLSKSRRLENLIAQLPGEKKNGLFGNLIALSLGLTPNFKSNFDLAEDAKLQLSKDTYDDDLDNLLAQIGDQYADLFLAAKNLSDAILLSDILRVNTEITKAPLSASMIKRYDEHHQDLTLLKALVRQQLPEKYKEIFFDQSKNGYAGYIDGGASQEEFYKFIKPILEKMDGTEELLVKLNREDLLRKQRTFDNGSIPHQIHLGELHAILRRQEDFYPFLKDNREKIEKILTFRIPYYVGPLARGNSRFAWMTRKSEETITPWNFEEVVDKGASAQSFIERMTNFDKNLPNEKVLPKHSLLYEYFTVYNELTKVKYVTEGMRKPAFLSGEQKKAIVDLLFKTNRKVTVKQLKEDYFKKIECFDSVEISGVEDRFNASLGTYHDLLKIIKDKDFLDNEENEDILEDIVLTLTLFEDREMIEERLKTYAHLFDDKVMKQLKRRRYTGWGRLSRKLINGIRDKQSGKTILDFLKSDGFANRNFMQLIHDDSLTFKEDIQKAQVSGQGDSLHEHIANLAGSPAIKKGILQTVKVVDELVKVMGRHKPENIVIEMARENQTTQKGQKNSRERMKRIEEGIKELGSQILKEHPVENTQLQNEKLYLYYLQNGRDMYVDQELDINRLSDYDVDHIVPQSFLKDDSIDNKVLTRSDKNRGKSDNVPSEEVVKKMKNYWRQLLNAKLITQRKFDNLTKAERGGLSELDKAGFIKRQLVETRQITKHVAQILDSRMNTKYDENDKLIREVKVITLKSKLVSDFRKDFQFYKVREINNYHHAHDAYLNAVVGTALIKKYPKLESEFVYGDYKVYDVRKMIAKSEQEIGKATAKYFFYSNIMNFFKTEITLANGEIRKRPLIETNGETGEIVWDKGRDFATVRKVLSMPQVNIVKKTEVQTGGFSKESILPKRNSDKLIARKKDWDPKKYGGFVSPTVAYSVLVVAKVEKGKSKKLKSVKELLGITIMERSSFEKNPIDFLEAKGYKEVKKDLIIKLPKYSLFELENGRKRMLASARELQKGNELALPSKYVNFLYLASHYEKLKGSPEDNEQKQLFVEQHKHYLDEIIEQISEFSKRVILADANLDKVLSAYNKHRDKPIREQAENIIHLFTLTNLGAPAAFKYFDTTIDRKQYRSTKEVLDATLIHQSITGLYETRIDLSQLGGDEGADKRTADGSEFESPKKKRKV

SEQ ID NO: 349 - protein, 1588 aa, synthetic construct
  REGION 1..1588: note = 09. monoABE8.1_bpNLS +Y147R_Q154R_I76Y polypeptide sequence
MSEVEFSHEYWMRHALTLAKRARDEREVPVGAVLVLNNRVIGEGWNRAIGLHDPTAHAEIMALRQGGLVMQNYRLYDATLYVTFEPCVMCAGAMIHSRIGRVVFGVRNAKTGAAGSLMDVLHYPGMNHRVEITEGILADECAALLCRFFRMPRRVFNAQKKAQSSTDSGGSSGGSSGSETPGTSESATPESSGGSSGGSDKKYSIGLAIGTNSVGWAVITDEYKVPSKKFKVLGNTDRHSIKKNLIGALLFDSGETAEATRLKRTARRRYTRRKNRICYLQEIFSNEMAKVDDSFFHRLEESFLVEEDKKHERHPIFGNIVDEVAYHEKYPTIYHLRKKLVDSTDKADLRLIYLALAHMIKFRGHFLIEGDLNPDNSDVDKLFIQLVQTYNQLFEENPINASGVDAKAILSARLSKSRRLENLIAQLPGEKKNGLFGNLIALSLGLTPNFKSNFDLAEDAKLQLSKDTYDDDLDNLLAQIGDQYADLFLAAKNLSDAILLSDILRVNTEITKAPLSASMIKRYDEHHQDLTLLKALVRQQLPEKYKEIFFDQSKNGYAGYIDGGASQEEFYKFIKPILEKMDGTEELLVKLNREDLLRKQRTFDNGSIPHQIHLGELHAILRRQEDFYPFLKDNREKIEKILTFRIPYYVGPLARGNSRFAWMTRKSEETITPWNFEEVVDKGASAQSFIERMTNFDKNLPNEKVLPKHSLLYEYFTVYNELTKVKYVTEGMRKPAFLSGEQKKAIVDLLFKTNRKVTVKQLKEDYFKKIECFDSVEISGVEDRFNASLGTYHDLLKIIKDKDFLDNEENEDILEDIVLTLTLFEDREMIEERLKTYAHLFDDKVMKQLKRRRYTGWGRLSRKLINGIRDKQSGKTILDFLKSDGFANRNFMQLIHDDSLTFKEDIQKAQVSGQGDSLHEHIANLAGSPAIKKGILQTVKVVDELVKVMGRHKPENIVIEMARENQTTQKGQKNSRERMKRIEEGIKELGSQILKEHPVENTQLQNEKLYLYYLQNGRDMYVDQELDINRLSDYDVDHIVPQSFLKDDSIDNKVLTRSDKNRGKSDNVPSEEVVKKMKNYWRQLLNAKLITQRKFDNLTKAERGGLSELDKAGFIKRQLVETRQITKHVAQILDSRMNTKYDENDKLIREVKVITLKSKLVSDFRKDFQFYKVREINNYHHAHDAYLNAVVGTALIKKYPKLESEFVYGDYKVYDVRKMIAKSEQEIGKATAKYFFYSNIMNFFKTEITLANGEIRKRPLIETNGETGEIVWDKGRDFATVRKVLSMPQVNIVKKTEVQTGGFSKESILPKRNSDKLIARKKDWDPKKYGGFVSPTVAYSVLVVAKVEKGKSKKLKSVKELLGITIMERSSFEKNPIDFLEAKGYKEVKKDLIIKLPKYSLFELENGRKRMLASARELQKGNELALPSKYVNFLYLASHYEKLKGSPEDNEQKQLFVEQHKHYLDEIIEQISEFSKRVILADANLDKVLSAYNKHRDKPIREQAENIIHLFTLTNLGAPAAFKYFDTTIDRKQYRSTKEVLDATLIHQSITGLYETRIDLSQLGGDEGADKRTADGSEFESPKKKRKV

SEQ ID NO: 350 - protein, 1588 aa, synthetic construct
  REGION 1..1588: note = 10. monoABE8.1_bpNLS +Y147R_Q154R_T166R polypeptide sequence
MSEVEFSHEYWMRHALTLAKRARDEREVPVGAVLVLNNRVIGEGWNRAIGLHDPTAHAEIMALRQGGLVMQNYRLIDATLYVTFEPCVMCAGAMIHSRIGRVVFGVRNAKTGAAGSLMDVLHYPGMNHRVEITEGILADECAALLCRFFRMPRRVFNAQKKAQSSRDSGGSSGGSSGSETPGTSESATPESSGGSSGGSDKKYSIGLAIGTNSVGWAVITDEYKVPSKKFKVLGNTDRHSIKKNLIGALLFDSGETAEATRLKRTARRRYTRRKNRICYLQEIFSNEMAKVDDSFFHRLEESFLVEEDKKHERHPIFGNIVDEVAYHEKYPTIYHLRKKLVDSTDKADLRLIYLALAHMIKFRGHFLIEGDLNPDNSDVDKLFIQLVQTYNQLFEENPINASGVDAKAILSARLSKSRRLENLIAQLPGEKKNGLFGNLIALSLGLTPNFKSNFDLAEDAKLQLSKDTYDDDLDNLLAQIGDQYADLFLAAKNLSDAILLSDILRVNTEITKAPLSASMIKRYDEHHQDLTLLKALVRQQLPEKYKEIFFDQSKNGYAGYIDGGASQEEFYKFIKPILEKMDGTEELLVKLNREDLLRKQRTFDNGSIPHQIHLGELHAILRRQEDFYPFLKDNREKIEKILTFRIPYYVGPLARGNSRFAWMTRKSEETITPWNFEEVVDKGASAQSFIERMTNFDKNLPNEKVLPKHSLLYEYFTVYNELTKVKYVTEGMRKPAFLSGEQKKAIVDLLFKTNRKVTVKQLKEDYFKKIECFDSVEISGVEDRFNASLGTYHDLLKIIKDKDFLDNEENEDILEDIVLTLTLFEDREMIEERLKTYAHLFDDKVMKQLKRRRYTGWGRLSRKLINGIRDKQSGKTILDFLKSDGFANRNFMQLIHDDSLTFKEDIQKAQVSGQGDSLHEHIANLAGSPAIKKGILQTVKVVDELVKVMGRHKPENIVIEMARENQTTQKGQKNSRERMKRIEEGIKELGSQILKEHPVENTQLQNEKLYLYYLQNGRDMYVDQELDINRLSDYDVDHIVPQSFLKDDSIDNKVLTRSDKNRGKSDNVPSEEVVKKMKNYWRQLLNAKLITQRKFDNLTKAERGGLSELDKAGFIKRQLVETRQITKHVAQILDSRMNTKYDENDKLIREVKVITLKSKLVSDFRKDFQFYKVREINNYHHAHDAYLNAVVGTALIKKYPKLESEFVYGDYKVYDVRKMIAKSEQEIGKATAKYFFYSNIMNFFKTEITLANGEIRKRPLIETNGETGEIVWDKGRDFATVRKVLSMPQVNIVKKTEVQTGGFSKESILPKRNSDKLIARKKDWDPKKYGGFVSPTVAYSVLVVAKVEKGKSKKLKSVKELLGITIMERSSFEKNPIDFLEAKGYKEVKKDLIIKLPKYSLFELENGRKRMLASARELQKGNELALPSKYVNFLYLASHYEKLKGSPEDNEQKQLFVEQHKHYLDEIIEQISEFSKRVILADANLDKVLSAYNKHRDKPIREQAENIIHLFTLTNLGAPAAFKYFDTTIDRKQYRSTKEVLDATLIHQSITGLYETRIDLSQLGGDEGADKRTADGSEFESPKKKRKV

SEQ ID NO: 351 - protein, 1588 aa, synthetic construct
  REGION 1..1588: note = 11. monoABE8.1_bpNLS +Y147T_Q154R polypeptide sequence
MSEVEFSHEYWMRHALTLAKRARDEREVPVGAVLVLNNRVIGEGWNRAIGLHDPTAHAEIMALRQGGLVMQNYRLIDATLYVTFEPCVMCAGAMIHSRIGRVVFGVRNAKTGAAGSLMDVLHYPGMNHRVEITEGILADECAALLCTFFRMPRRVFNAQKKAQSSTDSGGSSGGSSGSETPGTSESATPESSGGSSGGSDKKYSIGLAIGTNSVGWAVITDEYKVPSKKFKVLGNTDRHSIKKNLIGALLFDSGETAEATRLKRTARRRYTRRKNRICYLQEIFSNEMAKVDDSFFHRLEESFLVEEDKKHERHPIFGNIVDEVAYHEKYPTIYHLRKKLVDSTDKADLRLIYLALAHMIKFRGHFLIEGDLNPDNSDVDKLFIQLVQTYNQLFEENPINASGVDAKAILSARLSKSRRLENLIAQLPGEKKNGLFGNLIALSLGLTPNFKSNFDLAEDAKLQLSKDTYDDDLDNLLAQIGDQYADLFLAAKNLSDAILLSDILRVNTEITKAPLSASMIKRYDEHHQDLTLLKALVRQQLPEKYKEIFFDQSKNGYAGYIDGGASQEEFYKFIKPILEKMDGTEELLVKLNREDLLRKQRTFDNGSIPHQIHLGELHAILRRQEDFYPFLKDNREKIEKILTFRIPYYVGPLARGNSRFAWMTRKSEETITPWNFEEVVDKGASAQSFIERMTNFDKNLPNEKVLPKHSLLYEYFTVYNELTKVKYVTEGMRKPAFLSGEQKKAIVDLLFKTNRKVTVKQLKEDYFKKIECFDSVEISGVEDRFNASLGTYHDLLKIIKDKDFLDNEENEDILEDIVLTLTLFEDREMIEERLKTYAHLFDDKVMKQLKRRRYTGWGRLSRKLINGIRDKQSGKTILDFLKSDGFANRNFMQLIHDDSLTFKEDIQKAQVSGQGDSLHEHIANLAGSPAIKKGILQTVKVVDELVKVMGRHKPENIVIEMARENQTTQKGQKNSRERMKRIEEGIKELGSQILKEHPVENTQLQNEKLYLYYLQNGRDMYVDQELDINRLSDYDVDHIVPQSFLKDDSIDNKVLTRSDKNRGKSDNVPSEEVVKKMKNYWRQLLNAKLITQRKFDNLTKAERGGLSELDKAGFIKRQLVETRQITKHVAQILDSRMNTKYDENDKLIREVKVITLKSKLVSDFRKDFQFYKVREINNYHHAHDAYLNAVVGTALIKKYPKLESEFVYGDYKVYDVRKMIAKSEQEIGKATAKYFFYSNIMNFFKTEITLANGEIRKRPLIETNGETGEIVWDKGRDFATVRKVLSMPQVNIVKKTEVQTGGFSKESILPKRNSDKLIARKKDWDPKKYGGFVSPTVAYSVLVVAKVEKGKSKKLKSVKELLGITIMERSSFEKNPIDFLEAKGYKEVKKDLIIKLPKYSLFELENGRKRMLASARELQKGNELALPSKYVNFLYLASHYEKLKGSPEDNEQKQLFVEQHKHYLDEIIEQISEFSKRVILADANLDKVLSAYNKHRDKPIREQAENIIHLFTLTNLGAPAAFKYFDTTIDRKQYRSTKEVLDATLIHQSITGLYETRIDLSQLGGDEGADKRTADGSEFESPKKKRKV

SEQ ID NO: 352 - protein, 1588 aa, synthetic construct
  REGION 1..1588: note = 12. monoABE8.1_bpNLS +Y147T_Q154S polypeptide sequence
MSEVEFSHEYWMRHALTLAKRARDEREVPVGAVLVLNNRVIGEGWNRAIGLHDPTAHAEIMALRQGGLVMQNYRLIDATLYVTFEPCVMCAGAMIHSRIGRVVFGVRNAKTGAAGSLMDVLHYPGMNHRVEITEGILADECAALLCTFFRMPRSVFNAQKKAQSSTDSGGSSGGSSGSETPGTSESATPESSGGSSGGSDKKYSIGLAIGTNSVGWAVITDEYKVPSKKFKVLGNTDRHSIKKNLIGALLFDSGETAEATRLKRTARRRYTRRKNRICYLQEIFSNEMAKVDDSFFHRLEESFLVEEDKKHERHPIFGNIVDEVAYHEKYPTIYHLRKKLVDSTDKADLRLIYLALAHMIKFRGHFLIEGDLNPDNSDVDKLFIQLVQTYNQLFEENPINASGVDAKAILSARLSKSRRLENLIAQLPGEKKNGLFGNLIALSLGLTPNFKSNFDLAEDAKLQLSKDTYDDDLDNLLAQIGDQYADLFLAAKNLSDAILLSDILRVNTEITKAPLSASMIKRYDEHHQDLTLLKALVRQQLPEKYKEIFFDQSKNGYAGYIDGGASQEEFYKFIKPILEKMDGTEELLVKLNREDLLRKQRTFDNGSIPHQIHLGELHAILRRQEDFYPFLKDNREKIEKILTFRIPYYVGPLARGNSRFAWMTRKSEETITPWNFEEVVDKGASAQSFIERMTNFDKNLPNEKVLPKHSLLYEYFTVYNELTKVKYVTEGMRKPAFLSGEQKKAIVDLLFKTNRKVTVKQLKEDYFKKIECFDSVEISGVEDRFNASLGTYHDLLKIIKDKDFLDNEENEDILEDIVLTLTLFEDREMIEERLKTYAHLFDDKVMKQLKRRRYTGWGRLSRKLINGIRDKQSGKTILDFLKSDGFANRNFMQLIHDDSLTFKEDIQKAQVSGQGDSLHEHIANLAGSPAIKKGILQTVKVVDELVKVMGRHKPENIVIEMARENQTTQKGQKNSRERMKRIEEGIKELGSQILKEHPVENTQLQNEKLYLYYLQNGRDMYVDQELDINRLSDYDVDHIVPQSFLKDDSIDNKVLTRSDKNRGKSDNVPSEEVVKKMKNYWRQLLNAKLITQRKFDNLTKAERGGLSELDKAGFIKRQLVETRQITKHVAQILDSRMNTKYDENDKLIREVKVITLKSKLVSDFRKDFQFYKVREINNYHHAHDAYLNAVVGTALIKKYPKLESEFVYGDYKVYDVRKMIAKSEQEIGKATAKYFFYSNIMNFFKTEITLANGEIRKRPLIETNGETGEIVWDKGRDFATVRKVLSMPQVNIVKKTEVQTGGFSKESILPKRNSDKLIARKKDWDPKKYGGFVSPTVAYSVLVVAKVEKGKSKKLKSVKELLGITIMERSSFEKNPIDFLEAKGYKEVKKDLIIKLPKYSLFELENGRKRMLASARELQKGNELALPSKYVNFLYLASHYEKLKGSPEDNEQKQLFVEQHKHYLDEIIEQISEFSKRVILADANLDKVLSAYNKHRDKPIREQAENIIHLFTLTNLGAPAAFKYFDTTIDRKQYRSTKEVLDATLIHQSITGLYETRIDLSQLGGDEGADKRTADGSEFESPKKKRKV

SEQ ID NO: 353 - protein, 1588 aa, synthetic construct
  REGION 1..1588: note = 13. monoABE8.1_bpNLS +H123Y123H_Y147R_Q154R_I76Y polypeptide sequence
MSEVEFSHEYWMRHALTLAKRARDEREVPVGAVLVLNNRVIGEGWNRAIGLHDPTAHAEIMALRQGGLVMQNYRLYDATLYVTFEPCVMCAGAMIHSRIGRVVFGVRNAKTGAAGSLMDVLHHPGMNHRVEITEGILADECAALLCRFFRMPRRVFNAQKKAQSSTDSGGSSGGSSGSETPGTSESATPESSGGSSGGSDKKYSIGLAIGTNSVGWAVITDEYKVPSKKFKVLGNTDRHSIKKNLIGALLFDSGETAEATRLKRTARRRYTRRKNRICYLQEIFSNEMAKVDDSFFHRLEESFLVEEDKKHERHPIFGNIVDEVAYHEKYPTIYHLRKKLVDSTDKADLRLIYLALAHMIKFRGHFLIEGDLNPDNSDVDKLFIQLVQTYNQLFEENPINASGVDAKAILSARLSKSRRLENLIAQLPGEKKNGLFGNLIALSLGLTPNFKSNFDLAEDAKLQLSKDTYDDDLDNLLAQIGDQYADLFLAAKNLSDAILLSDILRVNTEITKAPLSASMIKRYDEHHQDLTLLKALVRQQLPEKYKEIFFDQSKNGYAGYIDGGASQEEFYKFIKPILEKMDGTEELLVKLNREDLLRKQRTFDNGSIPHQIHLGELHAILRRQEDFYPFLKDNREKIEKILTFRIPYYVGPLARGNSRFAWMTRKSEETITPWNFEEVVDKGASAQSFIERMTNFDKNLPNEKVLPKHSLLYEYFTVYNELTKVKYVTEGMRKPAFLSGEQKKAIVDLLFKTNRKVTVKQLKEDYFKKIECFDSVEISGVEDRFNASLGTYHDLLKIIKDKDFLDNEENEDILEDIVLTLTLFEDREMIEERLKTYAHLFDDKVMKQLKRRRYTGWGRLSRKLINGIRDKQSGKTILDFLKSDGFANRNFMQLIHDDSLTFKEDIQKAQVSGQGDSLHEHIANLAGSPAIKKGILQTVKVVDELVKVMGRHKPENIVIEMARENQTTQKGQKNSRERMKRIEEGIKELGSQILKEHPVENTQLQNEKLYLYYLQNGRDMYVDQELDINRLSDYDVDHIVPQSFLKDDSIDNKVLTRSDKNRGKSDNVPSEEVVKKMKNYWRQLLNAKLITQRKFDNLTKAERGGLSELDKAGFIKRQLVETRQITKHVAQILDSRMNTKYDENDKLIREVKVITLKSKLVSDFRKDFQFYKVREINNYHHAHDAYLNAVVGTALIKKYPKLESEFVYGDYKVYDVRKMIAKSEQEIGKATAKYFFYSNIMNFFKTEITLANGEIRKRPLIETNGETGEIVWDKGRDFATVRKVLSMPQVNIVKKTEVQTGGFSKESILPKRNSDKLIARKKDWDPKKYGGFVSPTVAYSVLVVAKVEKGKSKKLKSVKELLGITIMERSSFEKNPIDFLEAKGYKEVKKDLIIKLPKYSLFELENGRKRMLASARELQKGNELALPSKYVNFLYLASHYEKLKGSPEDNEQKQLFVEQHKHYLDEIIEQISEFSKRVILADANLDKVLSAYNKHRDKPIREQAENIIHLFTLTNLGAPAAFKYFDTTIDRKQYRSTKEVLDATLIHQSITGLYETRIDLSQLGGDEGADKRTADGSEFESPKKKRKV

SEQ ID NO: 354 - protein, 1588 aa, synthetic construct
  REGION 1..1588: note = 14. monoABE8.1_bpNLS + V82S +Q154R polypeptide sequence
MSEVEFSHEYWMRHALTLAKRARDEREVPVGAVLVLNNRVIGEGWNRAIGLHDPTAHAEIMALRQGGLVMQNYRLIDATLYSTFEPCVMCAGAMIHSRIGRVVFGVRNAKTGAAGSLMDVLHYPGMNHRVEITEGILADECAALLCYFFRMPRRVFNAQKKAQSSTDSGGSSGGSSGSETPGTSESATPESSGGSSGGSDKKYSIGLAIGTNSVGWAVITDEYKVPSKKFKVLGNTDRHSIKKNLIGALLFDSGETAEATRLKRTARRRYTRRKNRICYLQEIFSNEMAKVDDSFFHRLEESFLVEEDKKHERHPIFGNIVDEVAYHEKYPTIYHLRKKLVDSTDKADLRLIYLALAHMIKFRGHFLIEGDLNPDNSDVDKLFIQLVQTYNQLFEENPINASGVDAKAILSARLSKSRRLENLIAQLPGEKKNGLFGNLIALSLGLTPNFKSNFDLAEDAKLQLSKDTYDDDLDNLLAQIGDQYADLFLAAKNLSDAILLSDILRVNTEITKAPLSASMIKRYDEHHQDLTLLKALVRQQLPEKYKEIFFDQSKNGYAGYIDGGASQEEFYKFIKPILEKMDGTEELLVKLNREDLLRKQRTFDNGSIPHQIHLGELHAILRRQEDFYPFLKDNREKIEKILTFRIPYYVGPLARGNSRFAWMTRKSEETITPWNFEEVVDKGASAQSFIERMTNFDKNLPNEKVLPKHSLLYEYFTVYNELTKVKYVTEGMRKPAFLSGEQKKAIVDLLFKTNRKVTVKQLKEDYFKKIECFDSVEISGVEDRFNASLGTYHDLLKIIKDKDFLDNEENEDILEDIVLTLTLFEDREMIEERLKTYAHLFDDKVMKQLKRRRYTGWGRLSRKLINGIRDKQSGKTILDFLKSDGFANRNFMQLIHDDSLTFKEDIQKAQVSGQGDSLHEHIANLAGSPAIKKGILQTVKVVDELVKVMGRHKPENIVIEMARENQTTQKGQKNSRERMKRIEEGIKELGSQILKEHPVENTQLQNEKLYLYYLQNGRDMYVDQELDINRLSDYDVDHIVPQSFLKDDSIDNKVLTRSDKNRGKSDNVPSEEVVKKMKNYWRQLLNAKLITQRKFDNLTKAERGGLSELDKAGFIKRQLVETRQITKHVAQILDSRMNTKYDENDKLIREVKVITLKSKLVSDFRKDFQFYKVREINNYHHAHDAYLNAVVGTALIKKYPKLESEFVYGDYKVYDVRKMIAKSEQEIGKATAKYFFYSNIMNFFKTEITLANGEIRKRPLIETNGETGEIVWDKGRDFATVRKVLSMPQVNIVKKTEVQTGGFSKESILPKRNSDKLIARKKDWDPKKYGGFVSPTVAYSVLVVAKVEKGKSKKLKSVKELLGITIMERSSFEKNPIDFLEAKGYKEVKKDLIIKLPKYSLFELENGRKRMLASARELQKGNELALPSKYVNFLYLASHYEKLKGSPEDNEQKQLFVEQHKHYLDEIIEQISEFSKRVILADANLDKVLSAYNKHRDKPIREQAENIIHLFTLTNLGAPAAFKYFDTTIDRKQYRSTKEVLDATLIHQSITGLYETRIDLSQLGGDEGADKRTADGSEFESPKKKRKV

SEQ ID NO: 355 - protein, 4 aa, synthetic construct
  REGION 1..4: note = synthetic peptide sequence
SGGS

SEQ ID NO: 356 - protein, 24 aa, synthetic construct
  REGION 1..24: note = synthetic peptide sequence
SGGSSGSETPGTSESATPESSGGS

SEQ ID NO: 357 - protein, 32 aa, synthetic construct
  REGION 1..32: note = synthetic polypeptide sequence
SGGSSGGSSGSETPGTSESATPESSGGSSGGS

SEQ ID NO: 358 - protein, 104 aa, synthetic construct
  REGION 1..104: note = synthetic polypeptide sequence
GGSGGSPGSPAGSPTSTEEGTSESATPESGPGTSTEPSEGSAPGSPAGSPTSTEEGTSTEPSEGSAPGTSTEPSEGSAPGTSESATPESGPGSEPATSGGSGGS

SEQ ID NO: 359 - protein, 24 aa, synthetic construct
  REGION 1..24: note = synthetic peptide sequence
SGGSSGGSSGSETPGTSESATPES

SEQ ID NO: 360 - protein, 40 aa, synthetic construct
  REGION 1..40: note = synthetic polypeptide sequence
SGGSSGGSSGSETPGTSESATPESSGGSSGGSSGGSSGGS

SEQ ID NO: 361 - protein, 64 aa, synthetic construct
  REGION 1..64: note = synthetic polypeptide sequence
SGGSSGGSSGSETPGTSESATPESSGGSSGGSSGGSSGGSSGSETPGTSESATPESSGGSSGGS

SEQ ID NO: 362 - protein, 92 aa, synthetic construct
  REGION 1..92: note = synthetic polypeptide sequence
PGSPAGSPTSTEEGTSESATPESGPGTSTEPSEGSAPGSPAGSPTSTEEGTSTEPSEGSAPGTSTEPSEGSAPGTSESATPESGPGSEPATS

SEQ ID NO: 363 - protein, 5 aa, synthetic construct
  REGION 1..5: note = synthetic peptide sequence
PAPAP

SEQ ID NO: 364 - protein, 6 aa, synthetic construct
  REGION 1..6: note = synthetic peptide sequence
PAPAPA

SEQ ID NO: 365 - protein, 7 aa, synthetic construct
  REGION 1..7: note = synthetic peptide sequence
PAPAPAP

SEQ ID NO: 366 - protein, 8 aa, synthetic construct
  REGION 1..8: note = synthetic peptide sequence
PAPAPAPA

SEQ ID NO: 367 - protein, 9 aa, synthetic construct
  REGION 1..9: note = synthetic peptide sequence
PAPAPAPAP

SEQ ID NO: 368 - protein, 15 aa, synthetic construct
  REGION 1..15: note = synthetic peptide sequence
PAPAPAPAPAPAPAP

SEQ ID NO: 369 - protein, 21 aa, synthetic construct
  REGION 1..21: note = synthetic peptide sequence
PAPAPAPAPAPAPAPAPAPAP

SEQ ID NO: 370 - DNA, 306 bp, synthetic construct
  misc_feature 1..306: note = DnaE Intein-N polynucleotide sequence
  source 1..306: mol_type = other DNA
tgcctgtcatacgaaaccgagatactgacagtagaatatggccttctgccaatcgggaagattgtggagaaacggatagaatgcacagtttactctgtcgataacaatggtaacatttatactcagccagttgcccagtggcacgaccggggagagcaggaagtattcgaatactgtctggaggatggaagtctcattagggccactaaggaccacaaatttatgacagtcgatggccagatgctgcctatagacgaaatctttgagcgagagttggacctcatgcgagttgacaaccttcctaat

SEQ ID NO: 371 - protein, 102 aa, synthetic construct
  REGION 1..102: note = DnaE Intein-N polypeptide sequence
CLSYETEILTVEYGLLPIGKIVEKRIECTVYSVDNNGNIYTQPVAQWHDRGEQEVFEYCLEDGSLIRATKDHKFMTVDGQMLPIDEIFERELDLMRVDNLPN

SEQ ID NO: 372 - DNA, 108 bp, synthetic construct
  misc_feature 1..108: note = DnaE Intein-C polynucleotide sequence
  source 1..108: mol_type = other DNA
atgatcaagatagctacaaggaagtatcttggcaaacaaaacgtttatgatattggagtcgaaagagatcacaactttgctctgaagaacggattcatagcttctaat

SEQ ID NO: 373 - protein, 36 aa, synthetic construct
  REGION 1..36: note = DnaE Intein-C polypeptide sequence
MIKIATRKYLGKQNVYDIGVERDHNFALKNGFIASN

SEQ ID NO: 374 - DNA, 303 bp, synthetic construct
  misc_feature 1..303: note = Cfa-N polynucleotide sequence
  source 1..303: mol_type = other DNA
tgcctgtcttatgataccgagatacttaccgttgaatatggcttcttgcctattggaaagattgtcgaagagagaattgaatgcacagtatatactgtagacaagaatggtttcgtttacacacagcccattgctcaatggcacaatcgcggcgaacaagaagtatttgagtactgtctcgaggatggaagcatcatacgagcaactaaagatcataaattcatgaccactgacgggcagatgttgccaatagatgagatattcgagcggggcttggatctcaaacaagtggatggattgcca

SEQ ID NO: 375 - protein, 101 aa, synthetic construct
  REGION 1..101: note = Cfa-N polypeptide sequence
CLSYDTEILTVEYGFLPIGKIVEERIECTVYTVDKNGFVYTQPIAQWHNRGEQEVFEYCLEDGSIIRATKDHKFMTTDGQMLPIDEIFERGLDLKQVDGLP

SEQ ID NO: 376 - DNA, 159 bp, synthetic construct
  misc_feature 1..159: note = Cfa-C polynucleotide sequence
  source 1..159: mol_type = other DNA
atgaagaggactgccgatggatcagagtttgaatctcccaagaagaagaggaaagtaaagataatatctcgaaaaagtcttggtacccaaaatgtctatgatattggagtggagaaagatcacaacttccttctcaagaacggtctcgtagccagcaac

SEQ ID NO: 377 - protein, 53 aa, synthetic construct
  REGION 1..53: note = Cfa-C polypeptide sequence
MKRTADGSEFESPKKKRKVKIISRKSLGTQNVYDIGVEKDHNFLLKNGLVASN

SEQ ID NO: 378 - protein, 1081 aa, Neisseria meningitidis
  REGION 1..1081: note = MISC_FEATURE - Nme3Cas9; WP_002217928.1 type II CRISPR RNA-guided endonuclease Cas9 [Neisseria meningitidis]
  REGION 1..1081: note = MISC_FEATURE - NCBI Reference: WP_002217928.1; type II CRISPR RNA-guided endonuclease Cas9; Nme3Cas9 polypeptide sequence
MAAFKPNPINYILGLDIGIASVGWAMVEIDEEENPIRLIDLGVRVFERAEVPKTGDSLAMARRLARSVRRLTRRRAHRLLRARRLLKREGVLQAADFDENGLIKSLPNTPWQLRAAALDRKLTPLEWSAVLLHLIKHRGYLSQRKNEGETADKELGALLKGVADNAHALQTGDFRTPAELALNKFEKECGHIRNQRGDYSHTFSRKDLQAELNLLFEKQKEFGNPHVSGGLKEGIETLLMTQRPALSGDAVQKMLGHCTFEPAEPKAAKNTYTAERFIWLTKLNNLRILEQGSERPLTDTERATLMDEPYRKSKLTYAQARKLLSLEDTAFFKGLRYGKDNAEASTLMEMKAYHTISRALEKEGLKDKKSPLNLSPELQDEIGTAFSLFKTDEDITGRLKDRIQPEILEALLKHISFDKFVQISLKALRRIVPLMEQGKRYDEACAEIYGDHYGKKNTEEKIYLPPIPADEIRNPVVLRALSQARKVINGVVRRYGSPARIHIETAREVGKSFKDRKEIEKRQEENRKDREKAAAKFREYFPNFVGEPKSKDILKLRLYEQQHGKCLYSGKEINLGRLNEKGYVEIDHALPFSRTWDDSFNNKVLVLGSENQNKGNQTPYEYFNGKDNSREWQEFKARVETSRFPRSKKQRILLQKFDEDGFKERNLNDTRYVNRFLCQFVADRMRLTGKGKKRVFASNGQITNLLRGFWGLRKVRAENDRHHALDAVVVACSTVAMQQKITRFVRYKEMNAFDGKTIDKETGEVLHQKTHFPQPWEFFAQEVMIRVFGKPDGKPEFEEADTPEKLRTLLAEKLSSRPEAVHEYVTPLFVSRAPNRKMSGQGHMETVKSAKRLDEGVSVLRVPLTQLKLKDLEKMVNREREPKLYEALKARLEAHKDDPAKAFAEPFYKYDKAGNRTQQVKAVRVEQVQKTGVWVRNHNGIADNATMVRVDVFEKGDKYYLVPIYSWQVAKGILPDRAVVAYADEEDWTVIDESFRFKFVLYSNDLIKVQLKKDSFLGYFSGLDRATGAISLREHDLEKSKGKDGMHRIGVKTALSFQKYQIDEMGKEIRPCRLKKRPPVR

SEQ ID NO: 379 - RNA, 66 nt, synthetic construct
  misc_feature 1..66: note = Telomerase Ku Binding Motif oligonucleotide sequence
  source 1..66: mol_type = other RNA
ttcttgtcgtacttatagatcgctacgttatttcaattttgaaaatctgagtcctgggagtgcgga

SEQ ID NO: 380 - protein, 1094 aa, synthetic construct
  REGION 1..1094: note = Telomerase Ku Heterodimer polypeptide sequence
MSGWESYYKTEGDEEAEEEQEENLEASGDYKYSGRDSLIFLVDASKAMFESQSEDELTPFDMSIQCIQSVYISKIISSDRDLLAVVFYGTEKDKNSVNFKNIYVLQELDNPGAKRILELDQFKGQQGQKRFQDMMGHGSDYSLSEVLWVCANLFSDVQFKMSHKRIMLFTNEDNPHGNDSAKASRARTKAGDLRDTGIFLDLMHLKKPGGFDISLFYRDIISIAEDEDLRVHFEESSKLEDLLRKVRAKETRKRALSRLKLKLNKDIVISVGIYNLVQKALKPPPIKLYRETNEPVKTKTRTFNTSTGGLLLPSDTKRSQIYGSRQIILEKEETEELKRFDDPGLMLMGFKPLVLLKKHHYLRPSLFVYPEESLVIGSSTLFSALLIKCLEKEVAALCRYTPRRNIPPYFVALVPQEEELDDQKIQVTPPGFQLVFLPFADDKRKMPFTEKIMATPEQVGKMKAIVEKLRFTYRSDSFENPVLQQHFRNLEALALDLMEPEQAVDLTLPKVEAMNKRLGSLVDEFKELVYPPDYNPEGKVTKRKHDNEGSGSKRPKVEYSEEELKTHISKGTLGKFTVPMLKEACRAYGLKSGLKKQELLEALTKHFQDMVRSGNKAAVVLCMDVGFTMSNSIPGIESPFEQAKKVITMFVQRQVFAENKDEIALVLFGTDGTDNPLSGGDQYQNITVHRHLMLPDFDLLEDIESKIQPGSQQADFLDALIVSMDVIQHETIGKKFEKRHIEIFTDLSSRFSKSQLDIIIHSLKKCDISERHSIHWPCRLTIGSNLSIRIAAYKSILQERVKKTWTVVDAKTLKKEDIQKETVYCLNDDDETEVLKEDIIQGFRYGSDIVPFSKVDEEQMKYKSEGKCFSVLGFCKSSQVQRRFFMGNQVLKVFAARDDEAAAVALSSLIHALDDLDMVAIVRYAYDKRANPQVGVAFPHIKHNYECLVYVQLPFMEDLRQYMFSSLKNSKKYAPTEAQLNAVDALIDSMSLAKKDEKTDTLEDLFPTTKIPNPRFQRLFQCLLHRALHPREPLPPIQQHIWNMLNPPAEVTTKSQIPLSKIKTLFPLIEAKKKDQVTAQEIFQDNHEDGPTAK

SEQ ID NO: 381 - RNA, 10 nt, synthetic construct
  misc_feature 1..10: note = Telomerase Sm7 consensus site(single stranded) oligonucleotide sequence
  source 1..10: mol_type = other RNA
aatttttgga

SEQ ID NO: 382 - protein, 83 aa, synthetic construct
  REGION 1..83: note = MS2 coat protein polypeptide sequence
GSVIDVSSQRVNVQRPLDALGNSLNSPVIIKLKGDREFRGVLKSFDLHMNLVLNDAEELEDGEVTRRLGTVLIRGDNIVYISP

SEQ ID NO: 383 - RNA, 26 nt, synthetic construct
  misc_feature 1..26: note = PP7 phage operator stem loop oligonucleotide sequence
  source 1..26: mol_type = other RNA
ataaggagtttatatggaaaccctta

SEQ ID NO: 384 - protein, 128 aa, synthetic construct
  REGION 1..128: note = PP7 coat protein (PCP)polypeptide sequence
MSKTIVLSVGEATRTLTEIQSTADRQIFEEKVGPLVGRLRLTASLRQNGAKTAYRVNLKLDQADVVDCSTSVCGELPKVRYTQVWSHDVTIVANSTEASRKSLYDLTKSLVATSQVEDLVVNLVPLGR

SEQ ID NO: 385 - RNA, 19 nt, synthetic construct
  misc_feature 1..19: note = SfMu Com stem loop oligonucleotide sequence
  source 1..19: mol_type = other RNA
ctgaatgcctgcgagcatc

SEQ ID NO: 386 - protein, 62 aa, synthetic construct
  REGION 1..62: note = SfMu Com binding protein polypeptide sequence
MKSIRCKNCNKLLFKADSFDHIEIRCPRCKRHIIMLNACEHPTEKHCGKREKITHSDETVRY

SEQ ID NO: 387 - protein, 47 aa, synthetic construct
  REGION 1..47: note = leucine zipper polypeptide sequence
LEIRAAFLRQRNTALRTEVAELEQEVQRLENEVSQYETRYGPLGGGK

SEQ ID NO: 388 - protein, 47 aa, synthetic construct
  REGION 1..47: note = leucine zipper polypeptide sequence
LEIEAAFLERENTALETRVAELRQRVQRLRNRVSQYRTRYGPLGGGK

SEQ ID NO: 389 - DNA, 303 bp, synthetic construct
  source 1..303: mol_type = other DNA
tgcctgagctacgataccgagatcctgaccgtggaatacggcttcctgcctatcggcaagatcgtcgaggaacggatcgagtgcacagtgtacaccgtggataagaatggcttcgtgtacacccagcctatcgctcagtggcacaacagaggcgagcaagaggtgttcgagtactgcctggaagatggcagcatcatccgggccaccaaggaccacaagtttatgaccaccgacggccagatgctgcccatcgacgagatctttgagagaggcctggacctgaaacaggtggacggactgcct

SEQ ID NO: 390 - protein, 101 aa, synthetic construct; identical to SEQ ID NO: 375

SEQ ID NO: 391 - DNA, 264 bp, synthetic construct
  source 1..264: mol_type = other DNA
tgtctggacctcaagacccaagtgcagacacctcagggcatgaaagagattagcaatatccaggtgggcgacctggtcctgagcaacaccggctacaacgaggtgctgaacgtgttccctaagtccaagaagaaatcttataagatcaccctggaagatggcaaggaaatcatctgcagcgaggaacacctgttccccacccagaccggcgagatgaacatcagcggcggactgaaggagggcatgtgcctgtacgtgaaggag

SEQ ID NO: 392 - protein, 88 aa, synthetic construct
CLDLKTQVQTPQGMKEISNIQVGDLVLSNTGYNEVLNVFPKSKKKSYKITLEDGKEIICSEEHLFPTQTGEMNISGGLKEGMCLYVKE

SEQ ID NO: 393 - DNA, 267 bp, synthetic construct
  source 1..267: mol_type = other DNA
tgcctgagcctggacaccatggtggtgacaaacggcaaggccatcgagatcagagatgtgaaggtgggagattggctggaaagcgaatgtggcccagtgcaggttacagaggtgctgcctatcatcaagcagcctgtctttgagattgtgctgaaaagcggaaaaaagatccgggtgtccgctaatcacaagttccccaccaaggacggcctcaagaccatcaacagcggcctgaaggtgggcgacttcctgagaagcagagccaag

SEQ ID NO: 394 - protein, 89 aa, synthetic construct
CLSLDTMVVTNGKAIEIRDVKVGDWLESECGPVQVTEVLPIIKQPVFEIVLKSGKKIRVSANHKFPTKDGLKTINSGLKVGDFLRSRAK

SEQ ID NO: 395 - DNA, 303 bp, synthetic construct
  source 1..303: mol_type = other DNA
tgttttgtgcctggcaccctggtgaacacagagaatggcctgaagaaaatcgaggaaatcaaggtgggcgacaaggtgttcagccatacaggcaagctgcaggaggtggtggacaccctgatcttcgaccgggacgaggaaatcatctctatcaacggcattgattgcaccaagaaccacgagttctacgtgatcgataaggaaaacgctaatagagtgaacgaggacaacatccacctcttcgccagatgggtccacgccgaggaactggatatgaaaaagcacctgctgatcgagctggaa

SEQ ID NO: 396 - protein, 101 aa, synthetic construct
CFVPGTLVNTENGLKKIEEIKVGDKVFSHTGKLQEVVDTLIFDRDEEIISINGIDCTKNHEFYVIDKENANRVNEDNIHLFARWVHAEELDMKKHLLIELE

SEQ ID NO: 397 - DNA, 315 bp, synthetic construct
  source 1..315: mol_type = other DNA
tgcctggtgggctctagcgagattatcacaagaaactacggcaagaccaccatcaaggaagtggtcgagatcttcgacaacgacaagaatatccaggtgctggccttcaacacccacaccgataatatcgagtgggcccctatcaaggccgctcagctgaccagacctaacgccgagctggttgaactggaaatcgacaccctgcacggcgtgaaaacaatccggtgcacccctgaccaccccgtgtacaccaagaacagaggctacgtgcgggccgacgagctgacagatgatgacgagctcgtggtggctatc

SEQ ID NO: 398 - protein, 105 aa, synthetic construct
CLVGSSEIITRNYGKTTIKEVVEIFDNDKNIQVLAFNTHTDNIEWAPIKAAQLTRPNAELVELEIDTLHGVKTIRCTPDHPVYTKNRGYVRADELTDDDELVVAI

SEQ ID NO: 399 - DNA, 306 bp, synthetic construct
  source 1..306: mol_type = other DNA
tgcctgagctacgagacagagatcctgaccgtggaatatggcctgctgccaatcggaaagatcgtggaaaagcggatcgagtgcaccgtctacagcgtggacaacaacggaaatatctatacacagcctgtggcccaatggcacgaccggggcgaacaggaggtgtttgagtactgcctggaagatggttctctgattagagccaccaaggaccacaagttcatgaccgtcgacggccagatgctgcccatcgacgaaatcttcgagcgggaactcgacctgatgagagtggataacctgcccaat

SEQ ID NO: 400 - protein, 102 aa, synthetic construct; identical to SEQ ID NO: 371

SEQ ID NO: 401 - protein, 101 aa, synthetic construct; identical to SEQ ID NO: 375

SEQ ID NO: 402 - protein, 102 aa, synthetic construct; identical to SEQ ID NO: 371

SEQ ID NO: 403 - DNA, 279 bp, synthetic construct
  source 1..279: mol_type = other DNA
acaagaagcggatactgtctggacctcaagacccaagtgcagacacctcagggcatgaaagagattagcaatatccaggtgggcgacctggtcctgagcaacaccggctacaacgaggtgctgaacgtgttccctaagtccaagaagaaatcttataagatcaccctggaagatggcaaggaaatcatctgcagcgaggaacacctgttccccacccagaccggcgagatgaacatcagcggcggactgaaggagggcatgtgcctgtacgtgaaggag

SEQ ID NO: 404 - protein, 93 aa, synthetic construct
TRSGYCLDLKTQVQTPQGMKEISNIQVGDLVLSNTGYNEVLNVFPKSKKKSYKITLEDGKEIICSEEHLFPTQTGEMNISGGLKEGMCLYVKE

SEQ ID NO: 405 - DNA, 282 bp, synthetic construct
  source 1..282: mol_type = other DNA
tctcagctgaaccggtgcctgagcctggacaccatggtggtgacaaacggcaaggccatcgagatcagagatgtgaaggtgggagattggctggaaagcgaatgtggcccagtgcaggttacagaggtgctgcctatcatcaagcagcctgtctttgagattgtgctgaaaagcggaaaaaagatccgggtgtccgctaatcacaagttccccaccaaggacggcctcaagaccatcaacagcggcctgaaggtgggcgacttcctgagaagcagagccaag

SEQ ID NO: 406 - protein, 94 aa, synthetic construct
SQLNRCLSLDTMVVTNGKAIEIRDVKVGDWLESECGPVQVTEVLPIIKQPVFEIVLKSGKKIRVSANHKFPTKDGLKTINSGLKVGDFLRSRAK

SEQ ID NO: 407 - DNA, 318 bp, synthetic construct
  source 1..318: mol_type = other DNA
ggcatcggcggaggatgttttgtgcctggcaccctggtgaacacagagaatggcctgaagaaaatcgaggaaatcaaggtgggcgacaaggtgttcagccatacaggcaagctgcaggaggtggtggacaccctgatcttcgaccgggacgaggaaatcatctctatcaacggcattgattgcaccaagaaccacgagttctacgtgatcgataaggaaaacgctaatagagtgaacgaggacaacatccacctcttcgccagatgggtccacgccgaggaactggatatgaaaaagcacctgctgatcgagctggaa

SEQ ID NO: 408 - protein, 106 aa, synthetic construct
GIGGGCFVPGTLVNTENGLKKIEEIKVGDKVFSHTGKLQEVVDTLIFDRDEEIISINGIDCTKNHEFYVIDKENANRVNEDNIHLFARWVHAEELDMKKHLLIELE

SEQ ID NO: 409 - DNA, 330 bp, synthetic construct
  source 1..330: mol_type = other DNA
ggaacaaacccatgttgcctggtgggctctagcgagattatcacaagaaactacggcaagaccaccatcaaggaagtggtcgagatcttcgacaacgacaagaatatccaggtgctggccttcaacacccacaccgataatatcgagtgggcccctatcaaggccgctcagctgaccagacctaacgccgagctggttgaactggaaatcgacaccctgcacggcgtgaaaacaatccggtgcacccctgaccaccccgtgtacaccaagaacagaggctacgtgcgggccgacgagctgacagatgatgacgagctcgtggtggctatc

SEQ ID NO: 410 - protein, 110 aa, synthetic construct
GTNPCCLVGSSEIITRNYGKTTIKEVVEIFDNDKNIQVLAFNTHTDNIEWAPIKAAQLTRPNAELVELEIDTLHGVKTIRCTPDHPVYTKNRGYVRADELTDDDELVVAI

SEQ ID NO: 411 - DNA, 105 bp, synthetic construct
  source 1..105: mol_type = other DNA
gtcaagatcatcagcagaaagagcctgggcacccagaacgtgtacgatatcggagtgggcgagccccacaactttctgctcaagaatggcctggtggccagcaac

SEQ ID NO: 412 - protein, 35 aa, synthetic construct
VKIISRKSLGTQNVYDIGVGEPHNFLLKNGLVASN

SEQ ID NO: 413 - DNA, 114 bp, synthetic construct
  source 1..114: mol_type = other DNA
atgatgctgaaaaagatcctgaagatcgaggaactggatgagagagagctgatcgacatcgaagtgtctggcaatcacctgttctacgccaacgacatcctgacccacaacagc

SEQ ID NO: 414 - protein, 38 aa, synthetic construct
MMLKKILKIEELDERELIDIEVSGNHLFYANDILTHNS

SEQ ID NO: 415 - DNA, 138 bp, synthetic construct
  source 1..138: mol_type = other DNA
atgtgcgaaatcttcgagaacgagattgattgggacgaaatcgcctctatcgagtacgtgggcgtggaagagacaatcgacatcaacgtgaccaacgacagactgtttttcgccaatggcatcctgacccacaacagc

SEQ ID NO: 416 - protein, 46 aa, synthetic construct
MCEIFENEIDWDEIASIEYVGVEETIDINVTNDRLFFANGILTHNS

SEQ ID NO: 417 - DNA, 123 bp, synthetic construct
  source 1..123: mol_type = other DNA
atgaaattcaagctgaaggaaatcaccagcatcgagacaaagcactacaagggcaaggtgcacgatctgaccgtgaaccaggaccacagctacaacgtcagaggcaccgtggtgcataattct

SEQ ID NO: 418 - protein, 41 aa, synthetic construct
MKFKLKEITSIETKHYKGKVHDLTVNQDHSYNVRGTVVHNS

SEQ ID NO: 419 - DNA, 123 bp, synthetic construct
  source 1..123: mol_type = other DNA
atggaagccaagacctacatcggcaagctgaaatctagaaagatcgtgtccaacgaggatacatacgacatccagaccagcacccacaatttcttcgccaacgacatcctggtgcacaacagc

SEQ ID NO: 420 - protein, 41 aa, synthetic construct
MEAKTYIGKLKSRKIVSNEDTYDIQTSTHNFFANDILVHNS

SEQ ID NO: 421 - DNA, 108 bp, synthetic construct
  source 1..108: mol_type = other DNA
atgatcaagatcgccacaagaaagtacctgggcaagcagaacgtgtacgacatcggcgtggagagagaccacaacttcgccctgaagaacggctttatcgcctctaat

SEQ ID NO: 422 - protein, 36 aa, synthetic construct; identical to SEQ ID NO: 373

SEQ ID NO: 423 - protein, 36 aa, synthetic construct
MVKIISRKSLGTQNVYDIGVGEPHNFLLKNGLVASN

SEQ ID NO: 424 - protein, 35 aa, synthetic construct
IKIATRKYLGKQNVYDIGVERDHNFALKNGFIASN

SEQ ID NO: 425 - DNA, 88 bp, synthetic construct
  source 1..88: mol_type = other DNA; note = SaCas9 scaffold sequence
gttttagtactctgtaatgaaaattacagaatctactaaaacaaggcaaaatgccgtgtttatctcgtcaacttgttggcgagatttt

SEQ ID NO: 426 - DNA, 20 bp, synthetic construct
  source 1..20: mol_type = other DNA
cactcaccatagtccactcc

SEQ ID NO: 427 - DNA, 20 bp, synthetic construct
  source 1..20: mol_type = other DNA
ggaactcaccctcagcacag

SEQ ID NO: 428 - DNA, 20 bp, synthetic construct
  source 1..20: mol_type = other DNA
ctgctcacccaggttgtaat

SEQ ID NO: 429 - DNA, 20 bp, synthetic construct
  source 1..20: mol_type = other DNA
cttacctggtacagatctca

SEQ ID NO: 430 - DNA, 20 bp, synthetic construct
  source 1..20: mol_type = other DNA
cttttacctgtttccggtgc

SEQ ID NO: 431 - DNA, 20 bp, synthetic construct
  source 1..20: mol_type = other DNA
tccttaccgacaaggtgcct

SEQ ID NO: 432 - DNA, 20 bp, synthetic construct
  source 1..20: mol_type = other DNA
actgtacctcttctgatcgc

SEQ ID NO: 433 - DNA, 20 bp, synthetic construct
  source 1..20: mol_type = other DNA
agcctcttacaatcatttct

SEQ ID NO: 434 - DNA, 20 bp, synthetic construct
  source 1..20: mol_type = other DNA
aagcactcaccacgaccttc

SEQ ID NO: 435 - DNA, 20 bp, synthetic construct
  source 1..20: mol_type = other DNA
agcactcaccacgaccttca

SEQ ID NO: 436 - DNA, 20 bp, synthetic construct
  source 1..20: mol_type = other DNA
cgggacccaccttgagctct

SEQ ID NO: 437 - DNA, 20 bp, synthetic construct
  source 1..20: mol_type = other DNA
cggccttacccatttttcgg

SEQ ID NO: 438 - DNA, 20 bp, synthetic construct
  source 1..20: mol_type = other DNA
cacacttaccgagcccacgc

SEQ ID NO: 439 - DNA, 20 bp, synthetic construct
  source 1..20: mol_type = other DNA
cagacgcaccgtgatgctca

SEQ ID NO: 440 - DNA, 20 bp, synthetic construct
  source 1..20: mol_type = other DNA
agacgcaccgtgatgctcaa

SEQ ID NO: 441 - DNA, 20 bp, synthetic construct
  source 1..20: mol_type = other DNA
ggtctcaccatgaggtcaaa

SEQ ID NO: 442 - DNA, 20 bp, synthetic construct
  source 1..20: mol_type = other DNA
ctcacctgagtgcaagatga

SEQ ID NO: 443 - DNA, 20 bp, synthetic construct
  source 1..20: mol_type = other DNA
atggtaccggaatgcgcttg

SEQ ID NO: 444 - DNA, 20 bp, synthetic construct
  source 1..20: mol_type = other DNA
tggtaccggaatgcgcttga

SEQ ID NO: 445 - DNA, 20 bp, synthetic construct
  source 1..20: mol_type = other DNA
agtccctcacctggcggtga

SEQ ID NO: 446 - DNA, 20 bp, synthetic construct
  source 1..20: mol_type = other DNA
ctgacatacttgacgagttc

SEQ ID NO: 447 - DNA, 20 bp, synthetic construct
  source 1..20: mol_type = other DNA
acgcctagatcccagccaac

SEQ ID NO: 448 - DNA, 20 bp, synthetic construct
  source 1..20: mol_type = other DNA
cgcctagatcccagccaaca

SEQ ID NO: 449 - DNA, 20 bp, synthetic construct
  source 1..20: mol_type = other DNA
cccagtgctgcccagtttcg

SEQ ID NO: 450 - DNA, 20 bp, synthetic construct
  source 1..20: mol_type = other DNA
tgtcccgtaggttcctctac

SEQ ID NO: 451 - DNA, 20 bp, synthetic construct
  source 1..20: mol_type = other DNA
tctcagattgaggatggctc

SEQ ID NO: 452 - DNA, 20 bp, synthetic construct
  source 1..20: mol_type = other DNA
ctcagattgaggatggctcg

SEQ ID NO: 453 - DNA, 20 bp, synthetic construct
  source 1..20: mol_type = other DNA
gtccccccagatcatgaaca

SEQ ID NO: 454 - DNA, 20 bp, synthetic construct
  source 1..20: mol_type = other DNA
tccccccagatcatgaacaa

SEQ ID NO: 455 - DNA, 20 bp, synthetic construct
  source 1..20: mol_type = other DNA
cccagatcatgaacaagggc

SEQ ID NO: 456 - DNA, 20 bp, synthetic construct
  source 1..20: mol_type = other DNA
ccccccgcagatctgggacg

SEQ ID NO: 457 - DNA, 20 bp, synthetic construct
  source 1..20: mol_type = other DNA
cccgcagatctgggacgtgg

SEQ ID NO: 458 - DNA, 20 bp, synthetic construct
  source 1..20: mol_type = other DNA
cgcagtcggcaagtacccca

SEQ ID NO: 459 - DNA, 20 bp, synthetic construct
  source 1..20: mol_type = other DNA
ctccaggctgaccgcctacg

SEQ ID NO: 460 - DNA, 20 bp, synthetic construct
  source 1..20: mol_type = other DNA
tctttgcagataagaaccgc

SEQ ID NO: 461 - DNA, 20 bp, synthetic construct
  source 1..20: mol_type = other DNA
ctttgcagataagaaccgct

SEQ ID NO: 462 - DNA, 20 bp, synthetic construct
  source 1..20: mol_type = other DNA
tgcagataagaaccgctggg

SEQ ID NO: 463 - DNA, 20 bp, synthetic construct
  source 1..20: mol_type = other DNA
atccaggtaccggggagacc

SEQ ID NO: 464 - DNA, 20 bp, synthetic construct
  source 1..20: mol_type = other DNA
ccgcagaggaaagctgtacc

SEQ ID NO: 465 - DNA, 20 bp, synthetic construct
  source 1..20: mol_type = other DNA
cacagtgtacaagacccgac

SEQ ID NO: 466 - DNA, 20 bp, synthetic construct
  source 1..20: mol_type = other DNA
tccaggctcggatgaggtgc

SEQ ID NO: 467 - DNA, 20 bp, synthetic construct
  source 1..20: mol_type = other DNA
tccagcctcagctacatcat

SEQ ID NO: 468 - DNA, 20 bp, synthetic construct
  source 1..20: mol_type = other DNA
cagccttaccttgtccaggt

SEQ ID NO: 469 - DNA, 20 bp, synthetic construct
  source 1..20: mol_type = other DNA
ctgtacctcttctgatcgca

SEQ ID NO: 470 - DNA, 20 bp, synthetic construct
  source 1..20: mol_type = other DNA
cctcacctttggctgtggtc

SEQ ID NO: 471 - DNA, 20 bp, synthetic construct
  source 1..20: mol_type = other DNA
gcactcaccacgaccttcag

SEQ ID NO: 472 - DNA, 20 bp, synthetic construct
  source 1..20: mol_type = other DNA
acacttaccgagcccacgca

SEQ ID NO: 473 - DNA, 20 bp, synthetic construct
  source 1..20: mol_type = other DNA
ctatggtaccggaatgcgct

SEQ ID NO: 474 - DNA, 20 bp, synthetic construct
  source 1..20: mol_type = other DNA
ggtaccggaatgcgcttgag

SEQ ID NO: 475 - DNA, 20 bp, synthetic construct
  source 1..20: mol_type = other DNA
ccctcacctggcggtgatgg

SEQ ID NO: 476 - DNA, 20 bp, synthetic construct
  source 1..20: mol_type = other DNA
tgacatacttgacgagttcc

SEQ ID NO: 477 - DNA, 20 bp, synthetic construct
  source 1..20: mol_type = other DNA
tggcacctcaatgttgacca

SEQ ID NO: 478 - DNA, 20 bp, synthetic construct
  source 1..20: mol_type = other DNA
gcctagatcccagccaacag

SEQ ID NO: 479 - DNA, 20 bp, synthetic construct
  source 1..20: mol_type = other DNA
tcctcacagcatgggccagt

SEQ ID NO: 480 - DNA, 20 bp, synthetic construct
  source 1..20: mol_type = other DNA
gtcccgtaggttcctctacg

SEQ ID NO: 481 - DNA, 20 bp, synthetic construct
  source 1..20: mol_type = other DNA
ccgtaggttcctctacggga

SEQ ID NO: 482 - DNA, 20 bp, synthetic construct
  source 1..20: mol_type = other DNA
ccccacccaggtgcgcacga

SEQ ID NO: 483 - DNA, 20 bp, synthetic construct
  source 1..20: mol_type = other DNA
ccgcagatctgggacgtggt

SEQ ID NO: 484 - DNA, 20 bp, synthetic construct
  source 1..20: mol_type = other DNA
ccccctgcaggtaacctgga

SEQ ID NO: 485 - DNA, 20 bp, synthetic construct
  source 1..20: mol_type = other DNA
cctgcaggtaacctggatga

SEQ ID NO: 486 - DNA, 20 bp, synthetic construct
  source 1..20: mol_type = other DNA
cgagcagggatctgtgtggc

SEQ ID NO: 487 - DNA, 20 bp, synthetic construct
  source 1..20: mol_type = other DNA
ctgcgtagccggaaggaatc

SEQ ID NO: 488 - DNA, 20 bp, synthetic construct
  source 1..20: mol_type = other DNA
tctatctcagggtggattac

SEQ ID NO: 489 - DNA, 20 bp, synthetic construct
  source 1..20: mol_type = other DNA
tttgcagataagaaccgctg

SEQ ID NO: 490 - DNA, 20 bp, synthetic construct
  source 1..20: mol_type = other DNA
ccccagctggccaatggtgt

SEQ ID NO: 491 - DNA, 20 bp, synthetic construct
  source 1..20: mol_type = other DNA
cccccacagtgtacaagacc

SEQ ID NO: 492 - DNA, 21 bp, synthetic construct
  source 1..21: mol_type = other DNA
aactcaccctcagcacagcgg

SEQ ID NO: 493 - DNA, 21 bp, synthetic construct
  source 1..21: mol_type = other DNA
atgcagccttaccttgtccag

SEQ ID NO: 494 - DNA, 21 bp, synthetic construct
  source 1..21: mol_type = other DNA
cagccttaccttgtccaggta

SEQ ID NO: 495 - DNA, 21 bp, synthetic construct
  source 1..21: mol_type = other DNA
ttcttacctggtacagatctc

SEQ ID NO: 496 - DNA, 21 bp, synthetic construct
  source 1..21: mol_type = other DNA
ttccttttacctgtttccggt

SEQ ID NO: 497 - DNA, 21 bp, synthetic construct
  source 1..21: mol_type = other DNA
ccctcacctttggctgtggtc

SEQ ID NO: 498 - DNA, 21 bp, synthetic construct
  source 1..21: mol_type = other DNA
tgtctcaccttgcaggagaat

SEQ ID NO: 499 - DNA, 21 bp, synthetic construct
  source 1..21: mol_type = other DNA
gggacctactcctggccaggc

SEQ ID NO: 500 - DNA, 21 bp, synthetic construct
  source 1..21: mol_type = other DNA
ggcgacctcacctgccctctg

SEQ ID NO: 501 - DNA, 21 bp, synthetic construct
  source 1..21: mol_type = other DNA
ctggcccttaccttactctgc

SEQ ID NO: 502 - DNA, 21 bp, synthetic construct
  source 1..21: mol_type = other DNA
gcacacttaccgagcccacgc

SEQ ID NO: 503 - DNA, 21 bp, synthetic construct
  source 1..21: mol_type = other DNA
ggcctcacctgagtgcaagat

SEQ ID NO: 504 - DNA, 21 bp, synthetic construct
  source 1..21: mol_type = other DNA
tatggtaccggaatgcgcttg

SEQ ID NO: 505 - DNA, 21 bp, synthetic construct
  source 1..21: mol_type = other DNA
cctgacatacttgacgagttc

SEQ ID NO: 506 - DNA, 21 bp, synthetic construct
  source 1..21: mol_type = other DNA
cccagcctcacctgtggagcc

SEQ ID NO: 507 - DNA, 21 bp, synthetic construct
  source 1..21: mol_type = other DNA
acgcctagatcccagccaaca

SEQ ID NO: 508 - DNA, 21 bp, synthetic construct
  source 1..21: mol_type = other DNA
cccacagaacccggaaggcat

SEQ ID NO: 509 - DNA, 21 bp, synthetic construct
  source 1..21: mol_type = other DNA
tcctcacagcatgggccagtg

SEQ ID NO: 510 - DNA, 21 bp, synthetic construct
  source 1..21: mol_type = other DNA
tcccccagtgctgcccagttt

SEQ ID NO: 511 - DNA, 21 bp, synthetic construct
  source 1..21: mol_type = other DNA
cactgcgtagccggaaggaat

SEQ ID NO: 512 - DNA, 21 bp, synthetic construct
  source 1..21: mol_type = other DNA
tgctgcagggaccccagtggc

SEQ ID NO: 513 - DNA, 21 bp, synthetic construct
  source 1..21: mol_type = other DNA
ccactccaggctgaccgccta

SEQ ID NO: 514 - DNA, 21 bp, synthetic construct
  source 1..21: mol_type = other DNA
gtgtttctagaaaagaggcct

SEQ ID NO: 515 - DNA, 21 bp, synthetic construct
  source 1..21: mol_type = other DNA
ctatccaggtaccggggagac

SEQ ID NO: 516 - DNA, 21 bp, synthetic construct
  source 1..21: mol_type = other DNA
ccccctcaggtctcacactct

SEQ ID NO: 517 - DNA, 21 bp, synthetic construct
  source 1..21: mol_type = other DNA
tgcccgcagaggaaagctgta

SEQ ID NO: 518 - DNA, 21 bp, synthetic construct
  source 1..21: mol_type = other DNA
ccccacagtgtacaagacccg

SEQ ID NO: 519 - DNA, 21 bp, synthetic construct
  source 1..21: mol_type = other DNA
cactccaggctcggatgaggt

SEQ ID NO: 520 - DNA, 20 bp, synthetic construct
  source 1..20: mol_type = other DNA
agattcccagtggatacggt

SEQ ID NO: 521 - DNA, 20 bp, synthetic construct
  source 1..20: mol_type = other DNA
ttgagccaacgcacgacggg

SEQ ID NO: 522 - DNA, 20 bp, synthetic construct
  source 1..20: mol_type = other DNA
tcaccacggcccaggcgttc

SEQ ID NO: 523 - DNA, 20 bp, synthetic construct
  source 1..20: mol_type = other DNA
ttccggctacgcagtgttag

SEQ ID NO: 524 - DNA, 20 bp, synthetic construct
  source 1..20: mol_type = other DNA
cggctacgcagtgttagagg

SEQ ID NO: 525 - DNA, 20 bp, synthetic construct
  source 1..20: mol_type = other DNA
accacgtcccagatctgcgg

SEQ ID NO: 526 - DNA, 20 bp, synthetic construct
  source 1..20: mol_type = other DNA
aacctacgggacagacaagg

SEQ ID NO: 527 - DNA, 20 bp, synthetic construct
  source 1..20: mol_type = other DNA
tacctgtcggagtggggcac

SEQ ID NO: 528 - DNA, 20 bp, synthetic construct
  source 1..20: mol_type = other DNA
cgggacccaagtggtggaga

SEQ ID NO: 529 - DNA, 20 bp, synthetic construct
  source 1..20: mol_type = other DNA
tctaacccagggagatggcg

SEQ ID NO: 530 - DNA, 20 bp, synthetic construct
  source 1..20: mol_type = other DNA
aagaccggcagcctgtacct

SEQ ID NO: 531 - DNA, 20 bp, synthetic construct
  source 1..20: mol_type = other DNA
tgttgttcgaaacgagcagg

SEQ ID NO: 532 - DNA, 20 bp, synthetic construct
  source 1..20: mol_type = other DNA
cgactcccaagtcctctgcg

SEQ ID NO: 533 - DNA, 20 bp, synthetic construct
  source 1..20: mol_type = other DNA
cctacagagatcctacactg

SEQ ID NO: 534 - DNA, 20 bp, synthetic construct
  source 1..20: mol_type = other DNA
tggtaagcagctctacaacg

SEQ ID NO: 535 - DNA, 20 bp, synthetic construct
  source 1..20: mol_type = other DNA
gaacagagatactacggtgg

SEQ ID NO: 536 - DNA, 20 bp, synthetic construct
  source 1..20: mol_type = other DNA
catacaaaagtcggatgaca

SEQ ID NO: 537 - DNA, 20 bp, synthetic construct
  source 1..20: mol_type = other DNA
cattgagccaacgcacgacg

SEQ ID NO: 538 - DNA, 20 bp, synthetic construct
  source 1..20: mol_type = other DNA
cagccatttaacagccccgc

SEQ ID NO: 539 - DNA, 20 bp, synthetic construct
  source 1..20: mol_type = other DNA
ccttccggctacgcagtgtt

SEQ ID NO: 540 - DNA, 20 bp, synthetic construct
  source 1..20: mol_type = other DNA
ggaacctacgggacagacaa

SEQ ID NO: 541 - DNA, 20 bp, synthetic construct
  source 1..20: mol_type = other DNA
ggggtgcagaacccccgagc

SEQ ID NO: 542 - DNA, 20 bp, synthetic construct
  source 1..20: mol_type = other DNA
ctgcgaatggaccgcgccca

SEQ ID NO: 543 - DNA, 20 bp, synthetic construct
  source 1..20: mol_type = other DNA
ccgtgcagctcacggagaag

SEQ ID NO: 544 - DNA, 20 bp, synthetic construct
  source 1..20: mol_type = other DNA
ttcccgaagtgagttcccag

SEQ ID NO: 545 - DNA, 20 bp, synthetic construct
  source 1..20: mol_type = other DNA
gttgttcgaaacgagcaggt

SEQ ID NO: 546 - DNA, 20 bp, synthetic construct
  source 1..20: mol_type = other DNA
caataccaaaaggacgcccc

SEQ ID NO: 547 - DNA, 21 bp, synthetic construct
  source 1..21: mol_type = other DNA
gtgctccacccaagtgtcctt

SEQ ID NO: 548 - DNA, 21 bp, synthetic construct
  source 1..21: mol_type = other DNA
gtacactgtgggggagaggca

SEQ ID NO: 549 - DNA, 21 bp, synthetic construct
  source 1..21: mol_type = other DNA
ggcagattcccagtggatacg

SEQ ID NO: 550 - DNA, 21 bp, synthetic construct
  source 1..21: mol_type = other DNA
agattcccagtggatacggtg

SEQ ID NO: 551 - DNA, 21 bp, synthetic construct
  source 1..21: mol_type = other DNA
acttacgttgacctgctcctc

SEQ ID NO: 552 - DNA, 21 bp, synthetic construct
  source 1..21: mol_type = other DNA
actccttctgcagggtgagtg

SEQ ID NO: 553 - DNA, 21 bp, synthetic construct
  source 1..21: mol_type = other DNA
actcaccacggcccaggcgtt

SEQ ID NO: 554 - DNA, 21 bp, synthetic construct
  source 1..21: mol_type = other DNA
tccttccggctacgcagtgtt

SEQ ID NO: 555 - DNA, 21 bp, synthetic construct
  source 1..21: mol_type = other DNA
ccagaatctcccacgtggtga

SEQ ID NO: 556 - DNA, 21 bp, synthetic construct
  source 1..21: mol_type = other DNA
cgtagagattctggatggaga

SEQ ID NO: 557 - DNA, 21 bp, synthetic construct
  source 1..21: mol_type = other DNA
tccaggttacctgcagggggt

SEQ ID NO: 558 - DNA, 21 bp, synthetic construct
  source 1..21: mol_type = other DNA
acggaccaggtaggtgtagta

SEQ ID NO: 559 - DNA, 21 bp, synthetic construct
  source 1..21: mol_type = other DNA
tgcgcacctgggtggggaaag

SEQ ID NO: 560 - DNA, 21 bp, synthetic construct
  source 1..21: mol_type = other DNA
cgaacacctgtgatgtggggt

SEQ ID NO: 561 - DNA, 21 bp, synthetic construct
  source 1..21: mol_type = other DNA
cactgcctgaggggaccagct

SEQ ID NO: 562 - DNA, 21 bp, synthetic construct
  source 1..21: mol_type = other DNA
ctggcccatgctgtgaggagg

SEQ ID NO: 563 - DNA, 21 bp, synthetic construct
  source 1..21: mol_type = other DNA
cccatgctgtgaggagggcgg

SEQ ID NO: 564 - DNA, 21 bp, synthetic construct
  source 1..21: mol_type = other DNA
ccacgacgcgcaaggggatgt

SEQ ID NO: 565 - DNA, 21 bp, synthetic construct
  source 1..21: mol_type = other DNA
cttcgggacccaagtggtgga

SEQ ID NO: 566 - DNA, 21 bp, synthetic construct
  source 1..21: mol_type = other DNA
cgggatccaggatggcgaaca

SEQ ID NO: 567 - DNA, 21 bp, synthetic construct
  source 1..21: mol_type = other DNA
gcgaacagaggatttccctgc

SEQ ID NO: 568 - DNA, 21 bp, synthetic construct
  source 1..21: mol_type = other DNA
gcagaacccccgagcagaaga

SEQ ID NO: 569 - DNA, 21 bp, synthetic construct
  source 1..21: mol_type = other DNA
tccagcctaccgagtccccgt

SEQ ID NO: 570 - DNA, 21 bp, synthetic construct
  source 1..21: mol_type = other DNA
cagtccagggcgaggacactg

SEQ ID NO: 571 - DNA, 21 bp, synthetic construct
  source 1..21: mol_type = other DNA
acctgggcagcagatgaccct

SEQ ID NO: 572 - DNA, 21 bp, synthetic construct
  source 1..21: mol_type = other DNA
ctgacgcagagtaaggtaagg

SEQ ID NO: 573 - DNA, 21 bp, synthetic construct
  source 1..21: mol_type = other DNA
ggccagcagaccgcccagagg

SEQ ID NO: 574 - DNA, 21 bp, synthetic construct
  source 1..21: mol_type = other DNA
gcagaccgcccagagggcagg

SEQ ID NO: 575 - DNA, 21 bp, synthetic construct
  source 1..21: mol_type = other DNA
ttccgtgcagctcacggagaa

SEQ ID NO: 576 - DNA, 21 bp, synthetic construct
  source 1..21: mol_type = other DNA
tgttgttcgaaacgagcaggt

SEQ ID NO: 577 - DNA, 21 bp, synthetic construct
  source 1..21: mol_type = other DNA
gtggaaatccgagccgttctc

SEQ ID NO: 578 - DNA, 21 bp, synthetic construct
  source 1..21: mol_type = other DNA
ttaccggcagaaccaagagct

SEQ ID NO: 579 - DNA, 21 bp, synthetic construct
  source 1..21: mol_type = other DNA
cggcagaaccaagagctcaag

SEQ ID NO: 580 - DNA, 21 bp, synthetic construct
  source 1..21: mol_type = other DNA
tcagtgaccaagtcccggaca

SEQ ID NO: 581 - DNA, 21 bp, synthetic construct
  source 1..21: mol_type = other DNA
cctggagaagcagaagcccga

SEQ ID NO: 582 - DNA, 21 bp, synthetic construct
  source 1..21: mol_type = other DNA
ctcaatgaacagagatactac

SEQ ID NO: 583 - DNA, 21 bp, synthetic construct
  source 1..21: mol_type = other DNA
cctgaccaccaggaactgaac

SEQ ID NO: 584 - DNA, 21 bp, synthetic construct
  source 1..21: mol_type = other DNA
gcctcctgcgatcagaagagg

SEQ ID NO: 585 - DNA, 21 bp, synthetic construct
  source 1..21: mol_type = other DNA
ccaaagatcaactcacctgta

SEQ ID NO: 586 - DNA, 21 bp, synthetic construct
  source 1..21: mol_type = other DNA
gcttatccagcctggagcagt

SEQ ID NO: 587 - DNA, 21 bp, synthetic construct
  source 1..21: mol_type = other DNA
cttcatacaaaagtcggatga

SEQ ID NO: 588 - RNA, 20 nt, synthetic construct
  source 1..20: mol_type = other RNA
cactcaccatagtccactcc

SEQ ID NO: 589 - RNA, 20 nt, synthetic construct
  source 1..20: mol_type = other RNA
ggaactcaccctcagcacag

SEQ ID NO: 590 - RNA, 20 nt, synthetic construct
  source 1..20: mol_type = other RNA
ctgctcacccaggttgtaat

SEQ ID NO: 591 - RNA, 20 nt, synthetic construct
  source 1..20: mol_type = other RNA
cttacctggtacagatctca

SEQ ID NO: 592 - RNA, 20 nt, synthetic construct
  source 1..20: mol_type = other RNA
cttttacctgtttccggtgc

SEQ ID NO: 593 - RNA, 20 nt, synthetic construct
  source 1..20: mol_type = other RNA
tccttaccgacaaggtgcct

SEQ ID NO: 594 - RNA, 20 nt, synthetic construct
  source 1..20: mol_type = other RNA
actgtacctcttctgatcgc

SEQ ID NO: 595 - RNA, 20 nt, synthetic construct
  source 1..20: mol_type = other RNA
agcctcttacaatcatttct

SEQ ID NO: 596 - RNA, 20 nt, synthetic construct
  source 1..20: mol_type = other RNA
aagcactcaccacgaccttc

SEQ ID NO: 597 - RNA, 20 nt, synthetic construct
  source 1..20: mol_type = other RNA
agcactcaccacgaccttca

SEQ ID NO: 598 - RNA, 20 nt, synthetic construct
  source 1..20: mol_type = other RNA
cgggacccaccttgagctct

SEQ ID NO: 599 - RNA, 20 nt, synthetic construct
  source 1..20: mol_type = other RNA
cggccttacccatttttcgg

SEQ ID NO: 600 - RNA, 20 nt, synthetic construct
  source 1..20: mol_type = other RNA
cacacttaccgagcccacgc

SEQ ID NO: 601 - RNA, 20 nt, synthetic construct
  source 1..20: mol_type = other RNA
cagacgcaccgtgatgctca

SEQ ID NO: 602 - RNA, 20 nt, synthetic construct
  source 1..20: mol_type = other RNA
agacgcaccgtgatgctcaa

SEQ ID NO: 603 - RNA, 20 nt, synthetic construct
  source 1..20: mol_type = other RNA
ggtctcaccatgaggtcaaa

SEQ ID NO: 604 - RNA, 20 nt, synthetic construct
  source 1..20: mol_type = other RNA
ctcacctgagtgcaagatga

SEQ ID NO: 605 - RNA, 20 nt, synthetic construct
  source 1..20: mol_type = other RNA
atggtaccggaatgcgcttg

SEQ ID NO: 606 - RNA, 20 nt, synthetic construct
  source 1..20: mol_type = other RNA
tggtaccggaatgcgcttga

SEQ ID NO: 607 - RNA, 20 nt, synthetic construct
  source 1..20: mol_type = other RNA
agtccctcacctggcggtga

SEQ ID NO: 608 - RNA, 20 nt, synthetic construct
  source 1..20: mol_type = other RNA
ctgacatacttgacgagttc

SEQ ID NO: 609 - RNA, 20 nt, synthetic construct
  source 1..20: mol_type = other RNA
acgcctagatcccagccaac

SEQ ID NO: 610 - RNA, 20 nt, synthetic construct
  source 1..20: mol_type = other RNA
cgcctagatcccagccaaca

SEQ ID NO: 611 - RNA, 20 nt, synthetic construct
  source 1..20: mol_type = other RNA
cccagtgctgcccagtttcg

SEQ ID NO: 612 - RNA, 20 nt, synthetic construct
  source 1..20: mol_type = other RNA
tgtcccgtaggttcctctac

SEQ ID NO: 613 - RNA, 20 nt, synthetic construct
  source 1..20: mol_type = other RNA
tctcagattgaggatggctc

SEQ ID NO: 614 - RNA, 20 nt, synthetic construct
  source 1..20: mol_type = other RNA
ctcagattgaggatggctcg

SEQ ID NO: 615 - RNA, 20 nt, synthetic construct
  source 1..20: mol_type = other RNA
gtccccccagatcatgaaca

SEQ ID NO: 616 - RNA, 20 nt, synthetic construct
  source 1..20: mol_type = other RNA
tccccccagatcatgaacaa

SEQ ID NO: 617 - RNA, 20 nt, synthetic construct
  source 1..20: mol_type = other RNA
cccagatcatgaacaagggc

SEQ ID NO: 618 - RNA, 20 nt, synthetic construct
  source 1..20: mol_type = other RNA
ccccccgcagatctgggacg

SEQ ID NO: 619 - RNA, 20 nt, synthetic construct
  source 1..20: mol_type = other RNA
cccgcagatctgggacgtgg

SEQ ID NO: 620 - RNA, 20 nt, synthetic construct
  source 1..20: mol_type = other RNA
cgcagtcggcaagtacccca

SEQ ID NO: 621 - RNA, 20 nt, synthetic construct
  source 1..20: mol_type = other RNA
ctccaggctgaccgcctacg

SEQ ID NO: 622 - RNA, 20 nt, synthetic construct
  source 1..20: mol_type = other RNA
tctttgcagataagaaccgc

SEQ ID NO: 623 - RNA, 20 nt, synthetic construct
  source 1..20: mol_type = other RNA
ctttgcagataagaaccgct

SEQ ID NO: 624 - RNA, 20 nt, synthetic construct
  source 1..20: mol_type = other RNA
tgcagataagaaccgctggg

SEQ ID NO: 625 - RNA, 20 nt, synthetic construct
  source 1..20: mol_type = other RNA
atccaggtaccggggagacc

SEQ ID NO: 626 - RNA, 20 nt, synthetic construct
  source 1..20: mol_type = other RNA
ccgcagaggaaagctgtacc

SEQ ID NO: 627 - RNA, 20 nt, synthetic construct
  source 1..20: mol_type = other RNA
cacagtgtacaagacccgac

SEQ ID NO: 628 - RNA, 20 nt, synthetic construct
  source 1..20: mol_type = other RNA
tccaggctcggatgaggtgc

SEQ ID NO: 629 - RNA, 20 nt, synthetic construct
  source 1..20: mol_type = other RNA
tccagcctcagctacatcat

SEQ ID NO: 630 - RNA, 20 nt, synthetic construct
  source 1..20: mol_type = other RNA
cagccttaccttgtccaggt

SEQ ID NO: 631 - RNA, 20 nt, synthetic construct
  source 1..20: mol_type = other RNA
ctgtacctcttctgatcgca

SEQ ID NO: 632 - RNA, 20 nt, synthetic construct
  source 1..20: mol_type = other RNA
cctcacctttggctgtggtc

SEQ ID NO: 633 - RNA, 20 nt, synthetic construct
  source 1..20: mol_type = other RNA
gcactcaccacgaccttcag

SEQ ID NO: 634 - RNA, 20 nt, synthetic construct
  source 1..20: mol_type = other RNA
acacttaccgagcccacgca

SEQ ID NO: 635 - RNA, 20 nt, synthetic construct
  source 1..20: mol_type = other RNA
ctatggtaccggaatgcgct

SEQ ID NO: 636 - RNA, 20 nt, synthetic construct
  source 1..20: mol_type = other RNA
ggtaccggaatgcgcttgag

SEQ ID NO: 637 - RNA, 20 nt, synthetic construct
  source 1..20: mol_type = other RNA
ccctcacctggcggtgatgg

SEQ ID NO: 638 - RNA, 20 nt, synthetic construct
  source 1..20: mol_type = other RNA
tgacatacttgacgagttcc

SEQ ID NO: 639 - RNA, 20 nt, synthetic construct
  source 1..20: mol_type = other RNA
tggcacctcaatgttgacca

SEQ ID NO: 640 - RNA, 20 nt, synthetic construct
  source 1..20: mol_type = other RNA
gcctagatcccagccaacag

SEQ ID NO: 641 - RNA, 20 nt, synthetic construct
  source 1..20: mol_type = other RNA
tcctcacagcatgggccagt

SEQ ID NO: 642 - RNA, 20 nt, synthetic construct
  source 1..20: mol_type = other RNA
gtcccgtaggttcctctacg

SEQ ID NO: 643 - RNA, 20 nt, synthetic construct
  source 1..20: mol_type = other RNA
ccgtaggttcctctacggga

SEQ ID NO: 644 - RNA, 20 nt, synthetic construct
  source 1..20: mol_type = other RNA
ccccacccaggtgcgcacga

SEQ ID NO: 645 - RNA, 20 nt, synthetic construct
  source 1..20: mol_type = other RNA
ccgcagatctgggacgtggt

SEQ ID NO: 646 - RNA, 20 nt, synthetic construct
  source 1..20: mol_type = other RNA
ccccctgcaggtaacctgga

SEQ ID NO: 647 - RNA, 20 nt, synthetic construct
  source 1..20: mol_type = other RNA
cctgcaggtaacctggatga

SEQ ID NO: 648 - RNA, 20 nt, synthetic construct
  source 1..20: mol_type = other RNA
cgagcagggatctgtgtggc

SEQ ID NO: 649 - RNA, 20 nt, synthetic construct
  source 1..20: mol_type = other RNA
ctgcgtagccggaaggaatc

SEQ ID NO: 650 - RNA, 20 nt, synthetic construct
  source 1..20: mol_type = other RNA
tctatctcagggtggattac

SEQ ID NO: 651 - RNA, 20 nt, synthetic construct
  source 1..20: mol_type = other RNA
tttgcagataagaaccgctg

SEQ ID NO: 652 - RNA, 20 nt, synthetic construct
  source 1..20: mol_type = other RNA
ccccagctggccaatggtgt

SEQ ID NO: 653 - RNA, 20 nt, synthetic construct
  source 1..20: mol_type = other RNA
cccccacagtgtacaagacc

SEQ ID NO: 654 - RNA, 21 nt, synthetic construct
  source 1..21: mol_type = other RNA
aactcaccctcagcacagcgg

SEQ ID NO: 655 - RNA, 21 nt, synthetic construct
  source 1..21: mol_type = other RNA
atgcagccttaccttgtccag

SEQ ID NO: 656 - RNA, 21 nt, synthetic construct
  source 1..21: mol_type = other RNA
cagccttaccttgtccaggta

SEQ ID NO: 657 - RNA, 21 nt, synthetic construct
  source 1..21: mol_type = other RNA
ttcttacctggtacagatctc

SEQ ID NO: 658 - RNA, 21 nt, synthetic construct
  source 1..21: mol_type = other RNA
ttccttttacctgtttccggt

SEQ ID NO: 659 - RNA, 21 nt, synthetic construct
  source 1..21: mol_type = other RNA
ccctcacctttggctgtggtc

SEQ ID NO: 660 - RNA, 21 nt, synthetic construct
  source 1..21: mol_type = other RNA
tgtctcaccttgcaggagaat

SEQ ID NO: 661 - RNA, 21 nt, synthetic construct
  source 1..21: mol_type = other RNA
gggacctactcctggccaggc

SEQ ID NO: 662 - RNA, 21 nt, synthetic construct
  source 1..21: mol_type = other RNA
ggcgacctcacctgccctctg

SEQ ID NO: 663 - RNA, 21 nt, synthetic construct
  source 1..21: mol_type = other RNA
ctggcccttaccttactctgc

SEQ ID NO: 664 - RNA, 21 nt, synthetic construct
  source 1..21: mol_type = other RNA
gcacacttaccgagcccacgc

SEQ ID NO: 665 - RNA, 21 nt, synthetic construct
  source 1..21: mol_type = other RNA
ggcctcacctgagtgcaagat

SEQ ID NO: 666 - RNA, 21 nt, synthetic construct
  source 1..21: mol_type = other RNA
tatggtaccggaatgcgcttg

SEQ ID NO: 667 - RNA, 21 nt, synthetic construct
  source 1..21: mol_type = other RNA
cctgacatacttgacgagttc

SEQ ID NO: 668 - RNA, 21 nt, synthetic construct
  source 1..21: mol_type = other RNA
cccagcctcacctgtggagcc

SEQ ID NO: 669 - RNA, 21 nt, synthetic construct
  source 1..21: mol_type = other RNA
acgcctagatcccagccaaca

SEQ ID NO: 670 - RNA, 21 nt, synthetic construct
  source 1..21: mol_type = other RNA
cccacagaacccggaaggcat

SEQ ID NO: 671 - RNA, 21 nt, synthetic construct
  source 1..21: mol_type = other RNA
tcctcacagcatgggccagtg

SEQ ID NO: 672 - RNA, 21 nt, synthetic construct
  source 1..21: mol_type = other RNA
tcccccagtgctgcccagttt

SEQ ID NO: 673 - RNA, 21 nt, synthetic construct
  source 1..21: mol_type = other RNA
cactgcgtagccggaaggaat

SEQ ID NO: 674 - RNA, 21 nt, synthetic construct
  source 1..21: mol_type = other RNA
tgctgcagggaccccagtggc

SEQ ID NO: 675 - RNA, 21 nt, synthetic construct
  source 1..21: mol_type = other RNA
ccactccaggctgaccgccta

SEQ ID NO: 676 - RNA, 21 nt, synthetic construct
  source 1..21: mol_type = other RNA
gtgtttctagaaaagaggcct

SEQ ID NO: 677 - RNA, 21 nt, synthetic construct
  source 1..21: mol_type = other RNA
ctatccaggtaccggggagac

SEQ ID NO: 678 - RNA, 21 nt, synthetic construct
  source 1..21: mol_type = other RNA
ccccctcaggtctcacactct

SEQ ID NO: 679 - RNA, 21 nt, synthetic construct
  source 1..21: mol_type = other RNA
tgcccgcagaggaaagctgta

SEQ ID NO: 680 - RNA, 21 nt, synthetic construct
  source 1..21: mol_type = other RNA
ccccacagtgtacaagacccg

SEQ ID NO: 681 - RNA, 21 nt, synthetic construct
  source 1..21: mol_type = other RNA
cactccaggctcggatgaggt

SEQ ID NO: 682 - RNA, 20 nt, synthetic construct
  source 1..20: mol_type = other RNA
agattcccagtggatacggt

SEQ ID NO: 683 - RNA, 20 nt, synthetic construct
  source 1..20: mol_type = other RNA
ttgagccaacgcacgacggg

SEQ ID NO: 684 - RNA, 20 nt, synthetic construct
  source 1..20: mol_type = other RNA
tcaccacggcccaggcgttc

SEQ ID NO: 685 - RNA, 20 nt, synthetic construct
  source 1..20: mol_type = other RNA
ttccggctacgcagtgttag

SEQ ID NO: 686 - RNA, 20 nt, synthetic construct
  source 1..20: mol_type = other RNA
cggctacgcagtgttagagg

SEQ ID NO: 687 - RNA, 20 nt, synthetic construct
  source 1..20: mol_type = other RNA
accacgtcccagatctgcgg

SEQ ID NO: 688 - RNA, 20 nt, synthetic construct
  source 1..20: mol_type = other RNA
aacctacgggacagacaagg

SEQ ID NO: 689 - RNA, 20 nt, synthetic construct
  source 1..20: mol_type = other RNA
tacctgtcggagtggggcac

SEQ ID NO: 690 - RNA, 20 nt, synthetic construct
  source 1..20: mol_type = other RNA
cgggacccaagtggtggaga

SEQ ID NO: 691 - RNA, 20 nt, synthetic construct
  source 1..20: mol_type = other RNA
tctaacccagggagatggcg

SEQ ID NO: 692 - RNA, 20 nt, synthetic construct
  source 1..20: mol_type = other RNA
aagaccggcagcctgtacct

SEQ ID NO: 693 - RNA, 20 nt, synthetic construct
  source 1..20: mol_type = other RNA
tgttgttcgaaacgagcagg

SEQ ID NO: 694 - RNA, 20 nt, synthetic construct
  source 1..20: mol_type = other RNA
cgactcccaagtcctctgcg

SEQ ID NO: 695 - RNA, 20 nt, synthetic construct
  source 1..20: mol_type = other RNA
cctacagagatcctacactg

SEQ ID NO: 696 - RNA, 20 nt, synthetic construct
  source 1..20: mol_type = other RNA
tggtaagcagctctacaacg

SEQ ID NO: 697 - RNA, 20 nt, synthetic construct
  source 1..20: mol_type = other RNA
gaacagagatactacggtgg

SEQ ID NO: 698 - RNA, 20 nt, synthetic construct
  source 1..20: mol_type = other RNA
catacaaaagtcggatgaca

SEQ ID NO: 699 - RNA, 20 nt, synthetic construct
  source 1..20: mol_type = other RNA
cattgagccaacgcacgacg

SEQ ID NO: 700 - RNA, 20 nt, synthetic construct
  source 1..20: mol_type = other RNA
cagccatttaacagccccgc

SEQ ID NO: 701 - RNA, 20 nt, synthetic construct
  source 1..20: mol_type = other RNA
ccttccggctacgcagtgtt

SEQ ID NO: 702 - RNA, 20 nt, synthetic construct
  source 1..20: mol_type = other RNA
ggaacctacgggacagacaa

SEQ ID NO: 703 - RNA, 20 nt, synthetic construct
  source 1..20: mol_type = other RNA
ggggtgcagaacccccgagc

SEQ ID NO: 704 - RNA, 20 nt, synthetic construct
  source 1..20: mol_type = other RNA
ctgcgaatggaccgcgccca

SEQ ID NO: 705 - RNA, 20 nt, synthetic construct
  source 1..20: mol_type = other RNA
ccgtgcagctcacggagaag

SEQ ID NO: 706 - RNA, 20 nt, synthetic construct
  source 1..20: mol_type = other RNA
ttcccgaagtgagttcccag

SEQ ID NO: 707 - RNA, 20 nt, synthetic construct
  source 1..20: mol_type = other RNA
gttgttcgaaacgagcaggt

SEQ ID NO: 708 - RNA, 20 nt, synthetic construct
  source 1..20: mol_type = other RNA
caataccaaaaggacgcccc

SEQ ID NO: 709 - RNA, 21 nt, synthetic construct
  source 1..21: mol_type = other RNA
gtgctccacccaagtgtcctt

SEQ ID NO: 710 - RNA, 21 nt, synthetic construct
  source 1..21: mol_type = other RNA
gtacactgtgggggagaggca

SEQ ID NO: 711 - RNA, 21 nt, synthetic construct
  source 1..21: mol_type = other RNA
ggcagattcccagtggatacg

SEQ ID NO: 712 - RNA, 21 nt, synthetic construct
  source 1..21: mol_type = other RNA
agattcccagtggatacggtg

SEQ ID NO: 713 - RNA, 21 nt, synthetic construct
  source 1..21: mol_type = other RNA
acttacgttgacctgctcctc

SEQ ID NO: 714 - RNA, 21 nt, synthetic construct
  source 1..21: mol_type = other RNA
actccttctgcagggtgagtg

SEQ ID NO: 715 - RNA, 21 nt, synthetic construct
  source 1..21: mol_type = other RNA
actcaccacggcccaggcgtt

SEQ ID NO: 716 - RNA, 21 nt, synthetic construct
  source 1..21: mol_type = other RNA
tccttccggctacgcagtgtt

SEQ ID NO: 717 - RNA, 21 nt, synthetic construct
  source 1..21: mol_type = other RNA
ccagaatctcccacgtggtga

SEQ ID NO: 718 - RNA, 21 nt, synthetic construct
  source 1..21: mol_type = other RNA
cgtagagattctggatggaga

SEQ ID NO: 719 - RNA, 21 nt, synthetic construct
  source 1..21: mol_type = other RNA
tccaggttacctgcagggggt

SEQ ID NO: 720 - RNA, 21 nt, synthetic construct
  source 1..21: mol_type = other RNA
acggaccaggtaggtgtagta

SEQ ID NO: 721 - RNA, 21 nt, synthetic construct
  source 1..21: mol_type = other RNA
tgcgcacctgggtggggaaag

SEQ ID NO: 722 - RNA, 21 nt, synthetic construct
  source 1..21: mol_type = other RNA
cgaacacctgtgatgtggggt

SEQ ID NO: 723 - RNA, 21 nt, synthetic construct
  source 1..21: mol_type = other RNA
cactgcctgaggggaccagct

SEQ ID NO: 724 - RNA, 21 nt, synthetic construct
  source 1..21: mol_type = other RNA
ctggcccatgctgtgaggagg

SEQ ID NO: 725 - RNA, 21 nt, synthetic construct
  source 1..21: mol_type = other RNA
cccatgctgtgaggagggcgg

SEQ ID NO: 726 - RNA, 21 nt, synthetic construct
  source 1..21: mol_type = other RNA
ccacgacgcgcaaggggatgt

SEQ ID NO: 727 - RNA, 21 nt, synthetic construct
  source 1..21: mol_type = other RNA
cttcgggacccaagtggtgga

SEQ ID NO: 728 - RNA, 21 nt, synthetic construct
  source 1..21: mol_type = other RNA
cgggatccaggatggcgaaca

SEQ ID NO: 729 - RNA, 21 nt, synthetic construct
  source 1..21: mol_type = other RNA
gcgaacagaggatttccctgc

SEQ ID NO: 730 - RNA, 21 nt, synthetic construct
  source 1..21: mol_type = other RNA
gcagaacccccgagcagaaga

SEQ ID NO: 731 - RNA, 21 nt, synthetic construct
  source 1..21: mol_type = other RNA
tccagcctaccgagtccccgt

SEQ ID NO: 732 - RNA, 21 nt, synthetic construct
  source 1..21: mol_type = other RNA
cagtccagggcgaggacactg

SEQ ID NO: 733 - RNA, 21 nt, synthetic construct
  source 1..21: mol_type = other RNA
acctgggcagcagatgaccct

SEQ ID NO: 734 - RNA, 21 nt, synthetic construct
  source 1..21: mol_type = other RNA
ctgacgcagagtaaggtaagg

SEQ ID NO: 735 - RNA, 21 nt, synthetic construct
  source 1..21: mol_type = other RNA
ggccagcagaccgcccagagg

SEQ ID NO: 736 - RNA, 21 nt, synthetic construct
  source 1..21: mol_type = other RNA
gcagaccgcccagagggcagg

SEQ ID NO: 737 - RNA, 21 nt, synthetic construct
  source 1..21: mol_type = other RNA
ttccgtgcagctcacggagaa

SEQ ID NO: 738 - RNA, 21 nt, synthetic construct
  source 1..21: mol_type = other RNA
tgttgttcgaaacgagcaggt

SEQ ID NO: 739 - RNA, 21 nt, synthetic construct
  source 1..21: mol_type = other RNA
gtggaaatccgagccgttctc

SEQ ID NO: 740 - RNA, 21 nt, synthetic construct
  source 1..21: mol_type = other RNA
ttaccggcagaaccaagagct

SEQ ID NO: 741 - RNA, 21 nt, synthetic construct
  source 1..21: mol_type = other RNA
cggcagaaccaagagctcaag

SEQ ID NO: 742 - RNA, 21 nt, synthetic construct
  source 1..21: mol_type = other RNA
tcagtgaccaagtcccggaca

SEQ ID NO: 743 - RNA, 21 nt, synthetic construct
  source 1..21: mol_type = other RNA
cctggagaagcagaagcccga

SEQ ID NO: 744 - RNA, 21 nt, synthetic construct
  source 1..21: mol_type = other RNA
ctcaatgaacagagatactac

SEQ ID NO: 745 - RNA, 21 nt, synthetic construct
  source 1..21: mol_type = other RNA
cctgaccaccaggaactgaac

SEQ ID NO: 746 - RNA, 21 nt, synthetic construct
  source 1..21: mol_type = other RNA
gcctcctgcgatcagaagagg

SEQ ID NO: 747 - RNA, 21 nt, synthetic construct
  source 1..21: mol_type = other RNA
ccaaagatcaactcacctgta

SEQ ID NO: 748 - RNA, 21 nt, synthetic construct
  source 1..21: mol_type = other RNA
gcttatccagcctggagcagt

SEQ ID NO: 749 - RNA, 21 nt, synthetic construct
  source 1..21: mol_type = other RNA
cttcatacaaaagtcggatga

SEQ ID NO: 750 - DNA, 20 bp, synthetic construct
  source 1..20: mol_type = other DNA
tgctacctggatgcgcttga

SEQ ID NO: 751 - DNA, 20 bp, synthetic construct
  source 1..20: mol_type = other DNA
ctgcagcggaaagctgtacc

SEQ ID NO: 752 - RNA, 20 nt, synthetic construct
  source 1..20: mol_type = other RNA
tgctacctggatgcgcttga

SEQ ID NO: 753 - RNA, 20 nt, synthetic construct
  source 1..20: mol_type = other RNA
ctgcagcggaaagctgtacc

SEQ ID NO: 754 - DNA, 20 bp, synthetic construct
  source 1..20: mol_type = other DNA
ctgttccccgcagcccgagg

SEQ ID NO: 755 - DNA, 20 bp, synthetic construct
  source 1..20: mol_type = other DNA
atcatttcttggtgtatcac

SEQ ID NO: 756 - DNA, 20 bp, synthetic construct
  source 1..20: mol_type = other DNA
caccaagaaatgattgtaag

SEQ ID NO: 757 - DNA, 20 bp, synthetic construct
  source 1..20: mol_type = other DNA
aagaaatgattgtaagaggc

SEQ ID NO: 758 - DNA, 20 bp, synthetic construct
  source 1..20: mol_type = other DNA
gcgggccagccacctgggcc

SEQ ID NO: 759 - DNA, 20 bp, synthetic construct
  source 1..20: mol_type = other DNA
ccagccacctgggcctggcc

SEQ ID NO: 760 - DNA, 20 bp, synthetic construct
  source 1..20: mol_type = other DNA
ctggccaggagtaggtccca

SEQ ID NO: 761 - DNA, 20 bp, synthetic construct
  source 1..20: mol_type = other DNA
tggccaggagtaggtcccac

SEQ ID NO: 762 - DNA, 20 bp, synthetic construct
  source 1..20: mol_type = other DNA
ggccaggagtaggtcccacg

SEQ ID NO: 763 - DNA, 20 bp, synthetic construct
  source 1..20: mol_type = other DNA
cctggccaggcccaggtggc

SEQ ID NO: 764 - DNA, 20 bp, synthetic construct
  source 1..20: mol_type = other DNA
ggaacagaacatgatcggca

SEQ ID NO: 765 - DNA, 20 bp, synthetic construct
  source 1..20: mol_type = other DNA
tacaccaagaaatgattgta

SEQ ID NO: 766 - DNA, 20 bp, synthetic construct
  source 1..20: mol_type = other DNA
cagccacctgggcctggcca

SEQ ID NO: 767 - DNA, 21 bp, synthetic construct
  source 1..21: mol_type = other DNA
ttccccgcagcccgagggggt

SEQ ID NO: 768 - DNA, 21 bp, synthetic construct
  source 1..21: mol_type = other DNA
gccacctgggcctggccagga

SEQ ID NO: 769 - DNA, 21 bp, synthetic construct
  source 1..21: mol_type = other DNA
gttctgttccccgcagcccga

SEQ ID NO: 770 - DNA, 21 bp, synthetic construct
  source 1..21: mol_type = other DNA
caagaaatgattgtaagaggc

SEQ ID NO: 771 - DNA, 21 bp, synthetic construct
  source 1..21: mol_type = other DNA
gccagccacctgggcctggcc

SEQ ID NO: 772 - DNA, 21 bp, synthetic construct
  source 1..21: mol_type = other DNA
cctggccaggagtaggtccca

SEQ ID NO: 773 - RNA, 20 nt, synthetic construct
  source 1..20: mol_type = other RNA
ctgttccccgcagcccgagg

SEQ ID NO: 774 - RNA, 20 nt, synthetic construct
  source 1..20: mol_type = other RNA
atcatttcttggtgtatcac

SEQ ID NO: 775 - RNA, 20 nt, synthetic construct
  source 1..20: mol_type = other RNA
caccaagaaatgattgtaag

SEQ ID NO: 776 - RNA, 20 nt, synthetic construct
  source 1..20: mol_type = other RNA
aagaaatgattgtaagaggc

SEQ ID NO: 777 - RNA, 20 nt, synthetic construct
  source 1..20: mol_type = other RNA
gcgggccagccacctgggcc

SEQ ID NO: 778 - RNA, 20 nt, synthetic construct
  source 1..20: mol_type = other RNA
ccagccacctgggcctggcc

SEQ ID NO: 779 - RNA, 20 nt, synthetic construct
  source 1..20: mol_type = other RNA
ctggccaggagtaggtccca

SEQ ID NO: 780 - RNA, 20 nt, synthetic construct
  source 1..20: mol_type = other RNA
tggccaggagtaggtcccac

SEQ ID NO: 781 - RNA, 20 nt, synthetic construct
  source 1..20: mol_type = other RNA
ggccaggagtaggtcccacg

SEQ ID NO: 782 - RNA, 20 nt, synthetic construct
  source 1..20: mol_type = other RNA
cctggccaggcccaggtggc

SEQ ID NO: 783 - RNA, 20 nt, synthetic construct
  source 1..20: mol_type = other RNA
ggaacagaacatgatcggca

SEQ ID NO: 784 - RNA, 20 nt, synthetic construct
  source 1..20: mol_type = other RNA
tacaccaagaaatgattgta

SEQ ID NO: 785 - RNA, 20 nt, synthetic construct
  source 1..20: mol_type = other RNA
cagccacctgggcctggcca

SEQ ID NO: 786 - RNA, 21 nt, synthetic construct
  source 1..21: mol_type = other RNA
ttccccgcagcccgagggggt

SEQ ID NO: 787 - RNA, 21 nt, synthetic construct
  source 1..21: mol_type = other RNA
gccacctgggcctggccagga

SEQ ID NO: 788 - RNA, 21 nt, synthetic construct
  source 1..21: mol_type = other RNA
gttctgttccccgcagcccga

SEQ ID NO: 789 - RNA, 21 nt, synthetic construct
  source 1..21: mol_type = other RNA
caagaaatgattgtaagaggc

SEQ ID NO: 790 - RNA, 21 nt, synthetic construct
  source 1..21: mol_type = other RNA
gccagccacctgggcctggcc

SEQ ID NO: 791 - RNA, 21 nt, synthetic construct
  source 1..21: mol_type = other RNA
cctggccaggagtaggtccca

SEQ ID NO: 792 - RNA, 20 nt, synthetic construct
  source 1..20: mol_type = other RNA
caggatccgcacagactcca

SEQ ID NO: 793 - RNA, 20 nt, synthetic construct
  source 1..20: mol_type = other RNA
caacaagttcgtgaccgtgc

SEQ ID NO: 794 - DNA, 4992 bp, Homo sapiens
  source 1..4992: mol_type = other DNA
atgggacccacctcaggtcccagcctgctgctcctgctactaacccacctccccctggctctggggagtcccatgtactctatcatcacccccaacatcttgcggctggagagcgaggagaccatggtgctggaggcccacgacgcgcaaggggatgttccagtcactgttactgtccacgacttcccaggcaaaaaactagtgctgtccagtgagaagactgtgctgacccctgccaccaaccacatgggcaacgtcaccttcacgatcccagccaacagggagttcaagtcagaaaaggggcgcaacaagttcgtgaccgtgcaggccaccttcgggacccaagtggtggagaaggtggtgctggtcagcctgcagagcgggtacctcttcatccagacagacaagaccatctacacccctggctccacagttctctatcggatcttcaccgtcaaccacaagctgctacccgtgggccggacggtcatggtcaacattgagaacccggaaggcatcccggtcaagcaggactccttgtcttctcagaaccagcttggcgtcttgcccttgtcttgggacattccggaactcgtcaacatgggccagtggaagatccgagcctactatgaaaactcaccacagcaggtcttctccactgagtttgaggtgaaggagtacgtgctgcccagtttcgaggtcatagtggagcctacagagaaattctactacatctataacgagaagggcctggaggtcaccatcaccgccaggttcctctacgggaagaaagtggagggaactgcctttgtcatcttcgggatccaggatggcgaacagaggatttccctgcctgaatccctcaagcgcattccgattgaggatggctcgggggaggttgtgctgagccggaaggtactgctggacggggtgcagaacctccgagcagaagacctggtggggaagtctttgtacgtgtctgccaccgtcatcttgcactcaggcagtgacatggtgcaggcagagcgcagcgggatccccatcgtgacctctccctaccagatccacttcaccaagacacccaagtacttcaaaccaggaatgccctttgacctcatggtgttcgtgacgaaccctgatggctctccagcctaccgagtccccgtggcagtccagggcgaggacactgtgcagtctctaacccagggagatggcgtggccaaactcagcatcaacacacaccccagccagaagcccttgagcatcacggtgcgcacgaagaagcaggagctctcggaggcagagcaggctaccaggaccatgcaggctctgccctacagcaccgtgggcaactccaacaattacctgcatctctcagtgctacgtacagagctcagacccggggagaccctcaacgtcaacttcctcctgcgaatggaccgcgcccacgaggccaagatccgctactacacctacctgatcatgaacaagggcaggctgttgaaggcgggacgccaggtgcgagagcccggccaggacctggtggtgctgcccctgtccatcaccaccgacttcatcccttccttccgcctggtggcgtactacacgctgatcggtgccagcggccagagggaggtggtggccgactccgtgtgggtggacgtcaaggactcctgcgtgggctcgctggtggtaaaaagcggccagtcagaagaccggcagcctgtacctgggcagcagatgaccctgaagatagagggtgaccacggggcccgggtggtactggtggccgtggacaagggcgtgttcgtgctgaataagaagaacaaactgacgcagagtaagatctgggacgtggtggagaaggcagacatcggctgcaccccgggcagtgggaaggattacgccggtgtcttctccgacgcagggctgaccttcacgagcagcagtggccagcagaccgcccagagggcagaacttcagtgcccgcagccagccgcccgccgacgccgttccgtgcagctcacggagaagcgaatggacaaagtcggcaagtaccccaaggagctgcgcaagtgctgcgaggacggcatgcgggagaaccccatgaggttctcgtgccagcgccggacccgtttcatctccctgggcgaggcgtgcaagaaggtcttcctggactgctgcaactacatcacagagctgcggcggcagcacgcgcgggccagccacctgggcctggccaggagtaacctggatgaggacatcattgcagaagagaacatcgtttcccgaagtgagttcccagagagctggctgtggaacgttgaggacttgaaagagccaccgaaaaatggaatctctacgaagctcatgaatatatttttgaaagactccatcaccacgtgggagattctggctgtcagcatgtcggacaagaaagggatctgtgtggcagaccccttcgaggtcacagtaatgcaggacttcttcatcgacctgcggctaccctactctgttgttcgaaacgagcaggtggaaatccgagccgttctctacaattaccggcagaaccaagagctcaaggtgagggtggaactactccacaatccagccttctgcagcctggccaccaccaagaggcgtcaccagcagaccgtaaccatcccccccaagtcctcgttgtccgttccatatgtcatcgtgccgctaaagaccggcctgcaggaagtggaagtcaaggctgccgtctaccatcatttcatcagtgacggtgtcaggaagtccctgaaggtcgtgccggaaggaatcagaatgaacaaaactgtggctgttcgcaccctggatccagaacgcctgggccgtgaaggagtgcagaaagaggacatcccacctgcagacctcagtgaccaagtcccggacaccgagtctgagaccagaattctcctgcaagggaccccagtggcccagatgacagaggatgccgtcgacgcggaacggctgaagcacctcattgtgaccccctcgggctgcggggaacagaacatgatcggcatgacgcccacggtcatcgctgtgcattacctggatgaaacggagcagtgggagaagttcggcctagagaagcggcagggggccttggagctcatcaagaaggggtacacccagcagctggccttcagacaacccagctctgcctttgcggccttcgtgaaacgggcacccagcacctggctgaccgcctacgtggtcaaggtcttctctctggctgtcaacctcatcgccatcgactcccaagtcctctgcggggctgttaaatggctgatcctggagaagcagaagcccgacggggtcttccaggaggatgcgcccgtgatacaccaagaaatgattggtggattacggaacaacaacgagaaagacatggccctcacggcctttgttctcatctcgctgcaggaggctaaagatatttgcgaggagcaggtcaacagcctgccaggcagcatcactaaagcaggagacttccttgaagccaactacatgaacctacagagatcctacactgtggccattgctggctatgctctggcccagatgggcaggctgaaggggcctcttcttaacaaatttctgaccacagccaaagataagaaccgctgggaggaccctggtaagcagctctacaacgtggaggccacatcctatgccctcttggccctactgcagctaaaagactttgactttgtgcctcccgtcgtgcgttggctcaatgaacagagatactacggtggtggctatggctctacccaggccaccttcatggtgttccaagccttggctcaataccaaaaggacgcccctgaccaccaggaactgaaccttgatgtgtccctccaactgcccagccgcagctccaagatcacccaccgtatccactgggaatctgccagcctcctgcgatcagaagagaccaaggaaaatgagggtttcacagtcacagctgaaggaaaaggccaaggcaccttgtcggtggtgacaatgtaccatgctaaggccaaagatcaactcacctgtaataaattcgacctcaaggtcaccataaaaccagcaccggaaacagaaaagaggcctcaggatgccaagaacactatgatccttgagatctgtaccaggtaccggggagaccaggatgccactatgtctatattggacatatccatgatgactggctttgctccagacacagatgacctgaagcagctggccaatggtgttgacagatacatctccaagtatgagctggacaaagccttctccgataggaacaccctcatcatctacctggacaaggtctcacactctgaggatgactgtctagctttcaaagttcaccaatactttaatgtagagcttatccagcctggagcagtcaaggtctacgcctattacaacctggaggaaagctgtacccggttctaccatccggaaaaggaggatggaaagctgaacaagctctgccgtgatgaactgtgccgctgtgctgaggagaattgcttcatacaaaagtcggatgacaaggtcaccctggaagaacggctggacaaggcctgtgagccaggagtggactatgtgtacaagacccgactggtcaaggttcagctgtccaatgactttgacgagtacatcatggccattgagcagaccatcaagtcaggctcggatgaggtgcaggttggacagcagcgcacgttcatcagccccatcaagtgcagagaagccctgaagctggaggagaagaaacactacctcatgtggggtctctcctccgatttctggggagagaagcccaacctcagctacatcatcgggaaggacacttgggtggagcactggcctgaggaggacgaatgccaagacgaagagaaccagaaacaatgccaggacctcggcgccttcaccgagagcatggttgtctttgggtgccccaactga

SEQ ID NO: 795 - DNA, 32766 bp, Homo sapiens
  source 1..32766: mol_type = genomic DNA
agggcctgcgctgctgtgggagcgaggtgggtgcagcctgggtgagtctggggtagagtgggcaaggccagggctgctgtggttggggggagtggggcggggcctgagtggttccgggtagagtgggtggggcctgctgccctgcaacgctagacgcctcctcgctgtctgcccccagaatgacggactctgggttccgggaaggcctctccaaagtcaacaaaacagccagcgggcgggaactgttatgatcacctccacatctcagaccaaagggtcgtcctcccccagcatttctcactcctgcccttcttccacagcgtatgtggggaggtggagggggtccatgtggaccaggcgcccagctccccgggaccccggttcccggacaagcccatttggaagaagagtcccttcctccccccaaatattgggcagccctgtccttaccccgggaccacccctcccttccagctatgtgtacaataatgaccaatctgtttggctacgccgttgtcttgcctttttgggggttggggtctacacggaggttgtgtttacaatgtagaaacctgttttcgctgtgtgtggcgggggcgcgggcacagggtccgtgtctttgtatattcaataaatattcattcagtaaccgctgcatgcagggcccaaagccaggcgctgggacggagcggtcacaaagacccacctggtcccagccctaaaggggctcccagtgcccagagtgggggtcaggcagagggacatgtcacctggcagtaccatcactgggccatcagcgccgtgacgggaactgcacagggctctgacccggccttgggggtcaggaaaggtcagtagaaacatggcggaagagctcatgcccagatgagggaaccgcgggcatgaaagctgggggcgaggggagaacggggatttgaaggcccccaagtggctcaggctacagaggaaaagaaagaataggctgggcgtggtggctcacgcctgtaatcccagcactttggggggccaaggcggacggatcgtttgaggtcaggaggtcgagaccagcctggtcaacatggtgaaaccccgtctctactaaaaatacaaaaatttgccgggtgtggtggcaggtgcctgtaatggcagctactcaggaggctgaaatgggagaatcgcttgagccagggaggcagaggttgcagtgagcagagattgcaccattgcattccagcctgggcaacagagcaagactccatctcaaaacaaataataataatagaagctaaccgggcacagtgacaagtgcctgtagtagttccagctactcggaggtcagtgcaggagtatcactcaagcccaggagttaaagaccagccagggcaacaagcgagaccccatctcaagaaaagaaaaaataatacgaggtaacacagagtgattgctacgccacgctgtctattaaggcttctgtggattttaatttgttaaaaagcctgtgaggcacagagagggtaagaaacctccttgaggtcacacagctcatgagtgagtgggagactcccggctcaaagccagacactgactatatgcattgctgctccatagctagactccctgggaccaaatctctcagcctgttgccatttgctgtgtgaccctggatcactggcttactctctctgtttccttgcatataacatggggcctcctaagtttgttgagtatcacatacaatagcaggcacagcacccagctgcacagcctcgacctgatttctagggaaccagccctgaatcttgaggggcgactgaggaattggagatctgcttgtgtgcacacttaagggcaggttcccaagatgggtctccaccccccacccacctgcccttcaactagagcatccagaatgccttttggagctcggagaagccttcctcgctggagacacaagcatgggacagcggcagggaacagggctggggtgaaggcttcctgtaagcagaaacaaatatagctggggcccagatgaataaatagcctggtcagacaaagaaggaagtgggaggcattgcagactggggaagttacatgaacacggcggggaaggctgggatggcccgcgaggctggagggggcaggaggagggcgagagaagctggcagaggcctaaagacaggcaggcacatggggcttcatccaggggtccacaggagccatggaggaatttaaagcagggaggagcatggccagagagactgcatgtgcatgctgcagtcggctgagtcatggtcccctcaaagatgggcacgtccagcctgtgtggtggctcacacctgtcatcccagcactttgggagaccgaggcagacggatcacttgtcaggagttcaagaccagcctggccaacatggcgaaaccccatctctactaaaaataaaaaattagctgggcatggtggtgggcacctgtaattccagctactcgggaggctgaggcaggagaatcacttgaacccaggaggtggaggttgtagtaagctgagattgcaccactgtactccagccttggtgacagagcgagagacctgtctcaaaaaaaaaaaaaaaaaaaaaaggtgtgcacgtctgaatcctcaagacctgtggatatgatatgttctgtcacacggcaaaagggactttgtgcatgggattaaggctcttaaaatgggggagattatcttggattatctggatatgcccaatatcgtcacaggggtctttataagagggaggtgggagggtcagagttaaggagactcagtgacaaaggcagagactgcagtgattccaagaaaggggccacgagccaaggaatgcaggcggctcctagacactgaaaaaggcgaggaaatgggttcatctgtttcctccagaagggaacacagtcctgttgacaccttgattttagacgtctgacctccagaactgtaagataagaaacatgttgttttaacgcaccgagtttgcagtcatcttttgctgcagcagttaagaactcatgcagtttaagggcacgtactctatagggcccagctctctgagttcagattccggcacttaccagccacaggatctcgggcaagcagccaaagcctctgtttcttcatctgtaaaatggggcaatgatagaacctatggcatgtggcataaacaagggttaaaatacgtgaaatagataagttgctgccacccgcatctcataggcgtttgtgagcgtcagtgcgctcatgatcggtcaaaggaatacaaaggtagggtatttgttgttgttgttgttgtctgagacagtctcgccctgtcgcccaggctgaagtgcaatagtgcgatctcggctcactgcaacctccacctcctgggttcaagtgattctcccacctcagcctcccgagtagctgggattacaggcatgtgccaccacgcccggctaattttgtatttttagtagagacggggtttcaccctgttggccaggctggtctcaaaatcctggccacaagtgatccacccatctcggcctcccaaagtgctgggattataggcatgagccaccacgcctggcccaaaggtggattttagaaaggaaggagtccccaagccaggcatggtgacatgcaccttgtagtcccagctactcaggaggctgaggtgggaggattgcttgagcccagtagtttgaggccagagtgggctatgatggcaccactgcactccagcctgggcgacagggccataccctgcttttaaaagagtaaaataaggctgggcgcggtggctcacgcctgtaatcccagcactttggaaggcccagatgggcagatcatttgaggtcaggagttcgagaccagcctggccaacatggtgaaaccccgtctctactaaaaatacaaaaaattagccgggcgtggtggctggtgcctgtcatcccagctacttgggaggctgaggcaggagaattgtttgaactcaggaggcggagtttgcagtgagccaagatcgcaccattgcactccagcctgggcgacagagcaagactccgtctcacaaataaataaataaataaaatttagaaaaataaattaaataaataaaagtaaagcgtccccagctgctgcagagtaaatgggctggtaaggaggaggctggggcagaggtgagggcagagatcacaggtgtggagagggaggataagctgggagattccaggcaggggcttggccagcaggtgaattctgggaatgagaggaaggaaggagtccagcctggaagcctggtggggccgtcacccaagcaaggctggggtagaagacacgggtatttgcaaaaataaaaatacagttcatcaggagttcgagatcagcctggccaacatggtgaaaccctgtctctactaaaaatataagaattagccaggtgcggtggcgggcgcctgtaatctcagctacttgggaggctgaggcaggagaattgctggaaccgggcagcggaggttgcagtgagccaagatcgtgccattgcactccagcccaggccgacaacagcgagactctgtctcaaaaaacaaaaacaaaaagtacagttcaagtgtactgagcgctcagtatgcgcagggcgctgggttaaggattgtttcctgggtgccacttgggacttccactccaagactagaaaggaggctgtaggctgtgcatctccagttgatagattaggaaccgaggctgggaggaggggttggaccttcccaggggccctgcagagctggaatcaaaacccactgctctccattttcccagggcgggagtctatagggccccagcttgtttctgctgagtgtaccagagggagaggagggaaagagccattgttgccaggcagatagattgattcagtcagtcaggtcaaggttaacttgaattaatcagtaatagggtggaagaaggggatggccttgctgtgggttctggagaaaaattctaggaaagcagccacctcagcctggaattagacgatgggataggggtttcccagctgctcccaggcctggctgcccctttgttggggaaggggagggatgggatataggggacagtgagtgaactcaggcaggtgtgagccgggggcatctgggtcccccacccagaaatcattcccacttccttcctcttattttctttctttttcctgtcttgctctgtcattcaggctggggggcagtggtgcagtcatagctcagtgcagcctctaactcctcctgcctcagcctcccgaggagctgggactgcaggcacgccaccatgccctgctaatttttttttttttttcaattgtagagacgaagtctcactgtatttctcaggctggtctcgaactcctggactcaaacaatgctctcacctcggcctcccgaaagtgctgggattacaagcacgagccaccgcaccctggccccttctcattttccccttgcaccccagctaggattgccaaacagaatacaggacgctcagttacatttgaatttcagataaataacaactactttttcagtatatgtagcttccagataacccacgaatggtcagcccggttggccacactctccctccttgattccgggaatgctgggctgggtgggcctcaaaatggaaagtaccccaacacacacccagacctccttctctccctcccctgctggctcatccttgtgcactatccccctcccaaacctctggacaccaatgcacatctcccagaaaaaagtcacgaggttctgaagaattcccggtctcatctccctccctccttccctcccagtaggctaccatctgctccagcctccaaccccctcacttctcatcctgcccctcccctctggtcacttcttggaggtcagggtagggccagaccctttccaggttcaagtgattctcctgcttcagcctcccgagtagctgggattataggcacctgccaccatgctcagctaattctttgttgttgttgtttgttttgttttgttttgagacagagtctcgctcttgtcgcccaggctagagtgcagtggcacgatcttggctcactgcaacctccgcctcccaggttcaagtaattctcctgcctcggcctccccagtagctgggattacaggtgcccgccaccaatcctagttaatttttgtatttttagtagagatggggtttcaccatgttggccaggctggtcttgaactcctgacctcaggtgatccacccatctcggccttccaaagtgctgggatgacaggtgtgagccaccatgcctagccagctaatttttgtattttttagtagaaacagggtttcaccatgttagccaggctggtctcgaacccccgacctccagcgatcccccagcctcagcctcccaaagtgctgggatgacaggcgtgagccaccacacctggcccctctgagcctggtggcttctaggcatcctggtttctttaattgtcacaacaaccagaactatcttcagtcgcattgtttagttggattaaccgaggctcagagaaaagaggaacccaggcttgccgctagacagaggccagacaggaattccttctcaaggttgtcaaaccacagtgccgaatgcttgagtctagaatgaaaccaggaaatggggtggcttgaggagaaagtgggggatagaagatggaatggggcaattgggagatccagtttctttcctttttttaatttttttttttttttttggcaacagggtctctctctgtcacccaggctggagtgcagtggtgcaatctcagctcactgcaacctctgcctcccggcttcaagcgattctcctgcctcagcctcctgagtagctgggattacaggcacccaccaccacgcctggctaatttttgtactttcagtaaagacggggtttcaccatgttggccaggctggtctccaactcctggcctcaagtgatctgcctgcctcggcctcccaaagtgctgggattacagacgtgagccactgcgcctggcaaggggatgcagtttcaaaagctgaaccccaattctggagagcaagcaggtattttcattctctctcctcctcctcctcctcttccaaagagtgtgtcgcaatcagtgcagacagacgccaggtttgttctcatgctccacgcctccccctacccctggcacggaaaagaatgtggtttacaggaaatcagagaaaactccccattaaccccttcagtggggtttcagaaaccgcctctccagggataagggggccccacccacagacccttctcctgccctcaccatccacctcgtatgcctgggcagcaatgctgcagaacgtcagaggaatgccagttaaaatgacaccggctgccggggtgtggtggctcacttctataatcccagcactctgggaggccgaggtgggcggatcacctgaggtcaggagtttgagaccagcctggccaacatggcgaaaccctttctctactaaaaatacaaaaaataaaaaataaaagaaaaaaaaaattagccaggtgtagtggcgcatgcctgtgatcccagctctttgggaggctgaggcaggagaatcacttgaacccaggaggcagaggttgcagtgagctgagatggcgccactgcactccaccctgggtgacagcacaagactccatttaaaaaaacaaaacaaaacaaaaaaaatgacaccagggtaccagttttcacccataaggctggcaaaaatcttcaagttcatcaacatgcccttgtgatgaggctgtggaagaaactgacaattcatttcatgcagggctcataagtgtgtaaatcaatacaacttctgtgcaggggaatttggcaatatctagcaagattaccagtgcattcagagattgacccaacatatttcctttcattgcaacgacaactctatgaagcaggtggtaagggtttccttttccatgaacaaactgaggctcagggcggtaatcagtagcttacccaaagatcacagctagtttcagagctagaaaataacgcaggttcaagcttattcactgcagagagcctggtgtgaagccacagatgtcagtctctccatcaagaagaggctggtggctggacacagcggctcacgcctgtaattccaacactttgggaggccaaggtaggtgggtcacttgaagtcaggagttcaagaccagcctggccaacatggtgaaaccccttgtccactaaaaatacaaaaattgccagacgtggtggtgctcacctataatttcagccattccggaggctgaggcaggagaattgtttgaacccaggaggtggagggtgcagtgagctgagatagcgccactgccctccagcctgggtgacagggcaagactctaaaaaaaaaacactcaaacaaacaaaatatcccccaaaaagtaggaggctggttactttctcacaatataacaagaggcctgtaacctgtaagaatgaggcagttctttgctcactgaggtgaaatagcctctgaggtatattgttcatgaaaaaacgaaacaaaacgaaacccaagatttaactgaagagaccaggaagaatagtatgtgctatgtgctgtccacagggcacagtagttcacaccagcactttgtgaggctgctgcgggaggatcacttgagcccaggagttcaagactggactgggcaacatcgtgggacccccatctccacaaaaataaaaaaattatccgggcatggtggcggccacccgtagtcccggctacttgggtggttgagccaggatgatcacttgaccccaggaggttgaggctgcagtgagctgtgattgcaccactgcaatttagcctgagtgacagaatgaaaaaaaaatttttttaaaggaaaacacaaaaagaatatgctgtcaacagggatgggaggaagaccacctttactgctatacacatttgtaccttttagatgttgatcaatatgaatatattatacacacagacacacacacagacacacacacacacacaaacaatacaatttaatatcctaagaggatattgacattagacaggtacaaaagctctagaaatgaggactttcctcagtgatgacttttttcaccaccaaagtcactcaggcatcctgacaagggtaagtgaggggagcctccttggaaaataaactcacttggatagtgaactcctgcacatacctcaaagcccatctgaaatgtcccctcctacaggaagttttccctgaccctccaagaagcagagttctatttcactggggaaaacatttcttcttcttcttttttttccctgccctgcacatgagctagaaaacatttcatgaaactgggagtttctgtgctgggctctgtccctcccccattctacttcccctccctcagcatggaagcctctggaagtggggctctgactcccagcctacagagagattcctaggaagtgttcgactgataaacgcatggccaaaagtgaactggggatgaggtccaagacatctgcggtggggggttctccagaccttagtgttcttccactacaaagtgggtccaacagagaaaggtctgtgttcaccaggtggccctgaccctgggagagtccagggcagggtgcagctgcattcatgctgctggggaacatgccctcaggttactcaccccatggacatgttggccccagggactgaaaagcttaggaaatggtattgagaaatctggggcagccccaaaaggggagaggccatggggagaagggggggctgagtgggggaaaggcaggagccagataaaaagccagctccagcaggcgctgctcactcctccccatcctctccctctgtccctctgtccctctgaccctgcactgtcccagcaccatgggacccacctcaggtcccagcctgctgctcctgctactaacccacctccccctggctctggggagtcccatgtgagtggttatgactctacccacaaacagggctggttctggggtggaagcagacatttgggggtccaggtccctgtagaattcagggtgcatttgggtgtttgtggattcaggggttagcaggttgggaatgattatatatatttgggctgcctgtgagtttgggtgtttgtggttgggtgtttgtggaatccaggtatcatggaattggagtttatatacatttgggctgcctgtgagtttgggtgtttgtggttgggtgtttgtggaatccaggtatcgtggaattggagtttatatacatttgggctgcctgagagtttgggtgtttatgggttgggtgtttgtggaatccaggtatggtggaattggagtttgggatgtttctagaattgaggtcatctgttggtttagggtgtatgtggtgttcattgatggtgcggttgggggtgtttggagactcggaggtttggactttacaagatttgggagtttgcagcttggggacttgcaattttcagtgtgggtttaaagattggctacttcgggttcatgtatagttggggcatttggaattgattgtatttattaggactggggtgttggaggtttaggctgggtttggggtgctctaagatttgaggtttagaggttttggcgtatgtgggtttgggtaggtagagttgagggtgtccgggagtttgagtgtttacatatttggagtgtttagagaggtagaggtttagggtttggggcatgtgtgggtttaggcgattgtgggtctggaagtccagagacttggaggagttgctgacgctggttggaaggttcagggtttggtgggatgtgtggccccctcgttgcccaggctttcaaaggccaggcccagctggctgagagtgggagtcatggtggctgctgtcctgcccatgtggttgagacggtggcagtgcccagagaagataatggcattggcaagtgcgccggcagtcactggatcctctccaggaccagaggctggggcacacagcctgccaggcgctgactccagtgaggactggcgtctcacatccgtggaatgacaagcccactcccgtgccccactccgacaggtactctatcatcacccccaacatcttgcggctggagagcgaggagaccatggtgctggaggcccacgacgcgcaaggggatgttccagtcactgttactgtccacgacttcccaggcaaaaaactagtgctgtccagtgagaagactgtgctgacccctgccaccaaccacatgggcaacgtcaccttcacggtgagtgcagactggcgcaggacccggctgacacccacagccacgcccactccccccctcctcctgagcccctccccttctgtcttctccctttctaagccctgcccttccctgagactccaccccttcggagtcgcctctccttctaagcccctcccttctctgagactccaccccttctgagtctcctccccttataagcccctcccttttctgagacccccccccaccccttctgaatctcctccccttctaagccctgaccttccctgagaccccaccccttctgagactcctccccttctgagtccctcccttccctgagaccccaccccttctgaggttcctccccttctctgagactccaccccttctgagtctcctccccctctaagtccctcccactgaattccttttccaagcccctccccctcgaagtctcctcttctgaactcctcccctcttagtctccatcactttctaagttccctcacctgagtccctccccctttctgagcccctcccatgtcagccccttccctttctgagtccccgccccttctgagcccctcctcctataagctctctcctccttgtgagctcttctttttgagttccctccctggtcccccctctcccctcgcacctccttcacatgcccctccctccccaaaacggccacctcggaagaccaagaataatgggcaggcaaggagggacccagcccaagatccggaagctggaccgtgggcatggggccttggaacagacccctgacaatgccctgcccacgcctagatcccagccaacagggagttcaagtcagaaaaggggcgcaacaagttcgtgaccgtgcaggccaccttcgggacccaagtggtggagaaggtggtgctggtcagcctgcagagcgggtacctcttcatccagacagacaagaccatctacacccctggctccacaggtgaggctgggggcggctggagagggcggggcaccggcgtgggcgggctagggtctcacgaggcctctttgtctctccccagttctctatcggatcttcaccgtcaaccacaagctgctacccgtgggccggacggtcatggtcaacattgaggtgccagccagagggggccccaggggaagcaggggcacaggcttaggagaggcaaagagatcgagagagacagagaaagacacaccggaaggggtgcagtggcagagacacagaggcaaagagatatgcagacacacacccacacaacacacacacatacagcacacaacatgcacacacacagcacacaatacacacacagaggcaaagagatatgcagacacatgtgcacacacaatgcacacacacaatgcaacacacacaaacacacaacatacacgaccacacaacacacacaacacaacacacaacacaatacacacagcacaacgtgcatgaccacacacacaacacacaacacacacaacacaatacacaacatacacaaccacgcaatacacacaaaacacacacaacacaacacaacatacataaccacaccacacacaacacacaaccacacaacactatcacacaacacacacaaacacacacaacacacaacacacacaacacacacaaaacacaacacacacacaacatacacaaccacacaacacacaaccacacaacatacacgaccacacaacacagtgcacacaaacatagcacacacaacacacaacccaacacacaaccacacaatacaccatatggcgcgcacacacacacacacacacacacaggctgagagacaaggtggagatccagggagaccccagggagcagtgcaggtgtccgtggattctgctttcagttaaacccctgatcacttcacctccctgagcctcagttaccttatctgaatatcgggatcatgacggataattgtatgtcatctattctaccgacggcagccagaggacgcctgtgagcacctgagtcagggcccatccctgctctgcctacagccctccatggctcccaccttcctatgcgtcaaagcccaagtcctccctgcagtccacaaggccctgcacaccttgccctgtcccttccctgccctcccctcctccctctctccccctcgttcactcttctggagccacacgggccatcctccctgttcctccaacacccaggtgcagtcctgccttggcgccttggcacgggctgtgccctcttctcaagaaaaccctcttcttccaaatatccacacagcttgttctctctcctcctttaagtctttgctcaaatgtcaccaatgtctcaattttacaatgaggtctctctgagtaacctataaagtcgcaaatacccaccctgagcgtcccccctccccgctacacacactcctccttcctgccatgtcctgcaaatgagatttattcatttgataattgcttctcccatcgcctcgccctctattgaacctaaatccctccaggaaggaattgttatgtttgttgagggttttgtcacctgaactcagcacaatgctggtatatagttgggtttaataaaaaacttactggaagaagcgagaaggatgggaggagagaaggggaaggagggtgttctcatagaattatcatgaggatgtgttgaaatcatacaaggctaggtgcagtggctcacacttgtaatcccagctgtttgggaggccaaggcgggaggatcgcttgagcccaagagtccaagaccagcctgggcaacacagccagaccctgtctctacaaaaaagaaaagttaaaaacaaacaaaaaaacagctgtgtgtggtggtgcttgcttgtggttgcagctaccccaggaggctgaggcaggaggatcacttgagcccaggaattccaggctgcagtgagccgtgatcgcaccactgcactccagcctgggtggcagagtgagaccctgtctcaaaaaataattggggcaaatgcaatggctcaagcctgtaattccaacatttcgggaggcagaggtgggaagactgctcgaggccaagagttcaagaccagcctgggaaagctagggagactacatctctacaaaaaaaatgtaaaaattatctagatttagggattgatgtggtctgtggggaacagagaccacacatctcttgtaaaggcacaacagttgcccagctccaattagatgtctcctgctaaccagagtacactatccacagaaatttccttgtttccaacagaagctagaaaaacagatttttggccaggtgcagtggctcactcctataatcccagcactttgggaggtggaggcgggcagatcacgaggtcaggagatcgagaccatcctggctaacacggtgaaaccccgtctttattaaaagtacaaaaaaaaaattagctgggcgtggtggcgggcacctgtagtcccagctactcgagaggctgaggcaggagaatggtgtgaacccgggaggcggagcctgcagtgagccgagatctcgccattacactccagcctgggcgacagagcaagactccgtctcaaaaaaaaaaacaaaaaaaacaaaaaaaaaacagatttttatatgttttaattcctaaagccagctcacggccttcagatatgccacttgcctgatccctgttacctctgtacaatttcttttaaacttatttattcattcattcattcattattattatttttgagacagggtctcattctgttgcccaggctagagtgcagtggcacaatcacagctcactgcagcattgacctcctgggcccaagctgtcctcctgtctcagcctcctgggtagctgggaccacagacgtgcgccaccacatccagctaattttaaaaaatttttgtagagatggagtctccctacatttcccaggctggtcttgaacccttgaccttgagcaatcttcccacttctgcctctcaaagtgctgggattacaggcttgagccattgcgctcgccctaatacattattttttgagatggggtctcgctctttcacccagactggagtgcagtggtgcaatgatgtctcatgatgtttaaatgttggcagcaaatgaaatgacactactagttattagtattcagagagacactgaaaaaatgagcccctactcatatgaactatgtcccaagccaacacagtaggtgccattataatctcctgtttcaagatttgcacattgagcacagagaggttaggtaacttgcccagggtcacacagcttgtaagtggcacagtagagattgaaacctaaggttgactgactccggtccttgttctttttttcgagacagactctcactctgtctcccaggctggagtgcagtggagtgatcttggctctctgcaatctccgcctcccgggttcaagcgattctcccgcctcagcctcctgagtagctgggattacgggtgcctaccaccatgcctggctaatttttgtatttttagtagagacagggtttcatcacgttggccaggctggtcttgaactcctgacctcaggtgatctgcccgcctcagcctcccagagtgctgggatgacaggcgtgagccgctgcgcccacctgggtccctgttcttaaccacagtagacactgtgcacagagaatgtccagacacaggtcggggagagctgagaggctaagcccagcctccgaagagccactttatcctctatccttccctcctgcctcccacagaacccggaaggcatcccggtcaagcaggactccttgtcttctcagaaccagcttggcgtcttgcccttgtcttgggacattccggaactcgtcaagtatgtcaggttcttgaggagggggctcagggctcccctatccccggagagggagcaggggggctccgaggcctgagagaccactcatccgccctcctcacagcatgggccagtggaagatccgagcctactatgaaaactcaccacagcaggtcttctccactgagtttgaggtgaaggagtacggtaagaggaggaggggctggggggagtcagtgcccagaacgcctggcccagcgccggccccaccaacgccatctctcccccagtgctgcccagtttcgaggtcatagtggagcctacagagaaattctactacatctataacgagaagggcctggaggtcaccatcaccgccaggtgagggactgggggtggggccaggtaagagccaggtgagggaccaggtgaagaccaggtgggggactgggggtggagtcaggtggggggctggagatgggaccaggtggggggctgggggtggagtcaggtggggggctgggggtggggaaggtggggggctgggggtggggcaaggtgaggggctgggggtgggaccaggtggggggctggggggtggagtcaggtgggggctgggagtggggaaggtggggggctgggggtggggccaggtgaggggctggaggtgggaccatgtggggggtgggagtggggcaaggtggggggctgggggtggggccaggtgaggggctggaggtggggccaggtgagaggccagcagtgggttgggggctccagtcttcagcacaggcaggagaagctgggggagatcccattctccaggagggatggacctgaagccctccttgtctgtcccgtaggttcctctacgggaagaaagtggagggaactgcctttgtcatcttcgggatccaggatggcgaacagaggatttccctgcctgaatccctcaagcgcattccggtaccatagacggaggccgctttgatccctgccccagtccccgccacctctgagcccgctcccctctctgagccctcctctcccttctcagattgaggatggctcgggggaggttgtgctgagccggaaggtactgctggacggggtgcagaacccccgagcagaagacctggtggggaagtctttgtacgtgtctgccaccgtcatcttgcactcaggtgaggcccagtctgaaggccaggctcaggaccaccaagtgggccggtctgagaggggagaccaggtcagaagagaaagcctagtctaaggagggaggctcagagtgaaagtggggttcagtctgatggggtaggcccagtctgagaggggaggccgagtatgaagatggattccagcctgatggggggaggcagggccagtataaaggtggggtccgggctgatgggggcacaggcccagtatgaagtctgtgtccagtctgatgagggaggcagggccagtataaagatgggtccagtctgatgggggaggcagggccagtataaaggtggggtccggtctgatgggggtcacaggcccagtatgaagtctgtgccagtctgatggaggaggcaaggccagtataaaggtggagtccagtctgatggggggcacaggcccagtatgaaagtggactctactctgagggaggaggtctagtctgaagttggggtccattctgagggaggaggtctaatcctgaggggtggcccagaagcctacactcacagctggtcccctcaggcagtgacatggtgcaggcagagcgcagcgggatccccatcgtgacctctccctaccagatccacttcaccaagacacccaagtacttcaaaccaggaatgccctttgacctcatggtgagacccggggcgggaaggggtcccactcctcccttcggggacaccggccacagccctgagcctgcctgaacttcccccacctgcaccccacatcacaggtgttcgtgacgaaccctgatggctctccagcctaccgagtccccgtggcagtccagggcgaggacactgtgcagtctctaacccagggagatggcgtggccaaactcagcatcaacacacaccccagccagaagcccttgagcatcacggtgcgtctgggcccagcctcggaaccccatcactgggaagacggtacaggggttctggtgtttgcacagtggggtcctgtcatttgcatacagatattctcatctgcatagagaggttctctcctgcgcagaggggtcctgccatttgcatagagatactctcatctgcatagaggggttctgtcctgcacagtggggtcctgccatttgcatagacattctcatttgcctagaggggttctgtcctgcacagtggggtcctgccgtctgcatggaggggtccgcagtttgaggaaacaggaatcttcctcttgcatgccctgctccttccacttacacggagaggcgctccatccacgcacagtctttccactcccatgggggaaggagcctgaatctcacaaggagggttgtgtagtgtttgggacaggcccattgttgtgaggtggtctcagttctcctggcttctgtgcacgtggctctgttgcccctcactgggagggaagcaagtctcatgacagctgcggaggttgcagatggcctcccagtccctctgcagctcccaggctgcgcaccccacttacccctccctgtgctcagcatgtgcgtgaatttccggtggctaccatgagaaatggccacagcctagtgatctaaagcaacacacatttatgggtctatagtttgagaggtcagaagtcctggctctgggggaaagttcgctcccttgctttttccagtgtcgccagggcaccctaaaggcctggctcatggccccttcctccacctttaaaggcagcagcatagcatcttccagtgtctctctttctctctgtctctgtctctcctttctcccctgcccctgcttaataaagacccttatgattacattagctccacctacataatccaggataatgattccatctccagatccctaacttaatcccatctgcaaagccccttttgttaagaaaggccaccaattcccaggtctcagggattcgggtgtgggtatcctcgggcggcgaccagcaggcatccctctttccccacccaggtgcgcacgaagaagcaggagctctcggaggcagagcaggctaccaggaccatgcaggctctgccctacagcaccgtgggcaactccaacaattacctgcatctctcagtgctacgtacagagctcagacccggggagaccctcaacgtcaacttcctcctgcgaatggaccgcgcccacgaggccaagatccgctactacacctacctggtccgtggccacctggaaacctcagcccccgcctcctccttgtttcttccgcacccctgggactccttcccccatcccggatccctccctgcgttccctgccactcaccctccccagcctgatgccagcctgtccccccagatcatgaacaagggcaggctgttgaaggcgggacgccaggtgcgagagcccggccaggacctggtggtgctgcccctgtccatcaccaccgacttcatcccttccttccgcctggtggcgtactacacgctgatcggtgccagcggccagagggaggtggtggccgactccgtgtgggtggacgtcaaggactcctgcgtgggctcggtaagtgtgccctgggctcgctcgccccctctccctctccctactcctctctctctctctctctccctgtctcctctctctctctctctccctttctccttttctctctcctttctctctcttctcttcctctccctttctctcctccctctctgtctctcaactgtctctctttttatctctctttccctctctctacatctctctttccctctctctttatttctctttccttctctctctccctctctcgatctctctttctctccatctctctccttttctctctccctctctctctccttttctctctccctgtctctttccctttccctctctctcccctctctttctctccctctctctttccctctccctctctctctccctttctctctctccctctctctccttctctctccctctttctctccttctctctttccctctctctctccctctctctttccctctctctccctctccctttctctccctctttccctttccctctctcccccctcactctccctctctctgtctctccgtctctctccctctctccctgtctctccgtctctctccctgtctctccctttctctctctctcccgccctctctccctctctctccctccctctctccctttctctctctctccctctctctccccctccccagccccacggctccccccaacctttctgtctttccactctagcccagcacccactccatcccaggcactcctctctcccagggctgacttctttcggcgtctccaccctccccacagctggtggtaaaaagcggccagtcagaagaccggcagcctgtacctgggcagcagatgaccctgaagatagagggtgaccacggggcccgggtggtactggtggccgtggacaagggcgtgttcgtgctgaataagaagaacaaactgacgcagagtaaggtaagggccagtgacccaaggctgctgagaagaggcggaggcacggagctggggctgggggaggtgggtgggactggagagggcagtgcagtggggggcatgcgctgaaagcagagatcggagcagaccagacacagggatggttgaagctgaagatgggaatgaggttggacatgggttccaattggggatggtcctgagaattggacttttttttctgtttgtttgtttgtttttgagacagagtctctctctgtcaccaggctggagtgcagtggcacaatctcggctcactgcaacctctgcctcccaggttcaagcgattctcctgcctcagcttccctagtagctgggactacaggtgcccatcaccacgcccagctaatttttgtatttttagtgaagacgggggtttcaccatgttggccaggatggtctcgatctcttggccttgtgatccacccgcctcgacctcccaaagtgttgggattacaggcgtgagccactgcgcccggctgagaattggacactttcaactggggccctgagaggctggtggcagcacacccagggtcattcagtggggaaggtttccggagtagggacgaagatggagatggggttggcttgggatcaggagtgaggatgggaatgcagatggaatcagaggggaaatggagataagatttggaatggaggccaggtgcggtggctcacgtctggaatcccagcactttgggaggtcaaggtgggaggatcacttgaggccaggagttcagaccagcttgggcaacatggcaagaccccatctctacagaaaaaattttaaaatagctgggcatgatggcgcatgcctgtagtcccatctgctcaggaggcagaggtgcgaggattgcttgagcccaggaatttgaggctgcagtgagctatgcctgcaccactgcactccagcctgggagacagtggaaaatcccaacttaaaaaaaaaaaaaaagaatggaaagaaaggaggaaaaaaaaagaagagagagagaaacagagagaaagaaaaagaaaggagataaagaggaagggagggagggagtgaagaatgaaggaaggaaagaaggaaggaaggaaggagggaaggagggaaggaaagggggagcaaaggaaggaggaaaggaggaatggagggaggaagggagggagaggaaggaagggaaagaaagaagacagaaagaaaagaaaaagaaggccgggcatggtggctcactcctgtaatccctttgggaggccaagcactttgggaggccaagacaggcgaatcatttcaggtcaggagttcgagaccagcctggccaacatggtgaaatcccgtctctactaaatatataaaaattagctgggcatggtggcatgcacctgtagtcccagatactcgggaggctgaggcaggaaaattgcctgaacctgggagttggaggttacagtgagcggagatcacaccactgcactccagcctgggtgacagagcaagactccatctcgaaagaaagaaagagagagagtgagaaagagaaagaaaaagagaaggaaggagagagaaggaaggaaggaaagagaaagagaaaggaagggcagaagcaggaatgggggagatgagagtgggacagggtggggtcatttgggaagagatacacaggtgcatatgtgggggatcccaattgtcagcctggcctccctgcgtcccgccacccctatgccccccgcagatctgggacgtggtggagaaggcagacatcggctgcaccccgggcagtgggaaggattacgccggtgtcttctccgacgcagggctgaccttcacgagcagcagtggccagcagaccgcccagagggcaggtgaggtcgccaccaggggccggtgcagggacagacagcacctccacctcccagatgctgggagcagagctctggaaaccgggggcctgggttcaagccccgcctccaccaccacctagtaaatccctcccctctgagcctcagtttgctcttccatcaaatgggagcaggaacacccccacctcacacgatcgtgaggggtgaaccgaggacacctagtaggtgcctcatccatcttcttctcggtccgcctgccctgcagaacttcagtgcccgcagccagccgcccgccgacgccgttccgtgcagctcacggagaagcgaatggacaaaggtgggagcctttcctacccactcctgcccccgagccccaccccaggagaccccagcccggccgtgcaggagccagagagggaggaggggaggccctggcggcggggaagtcctccctggggtccgtcccgcgtccctcctgctgccggcccccggctgagggtgtggcctgggggaacacgtgctcccgcagtcggcaagtaccccaaggagctgcgcaagtgctgcgaggacggcatgcgggagaaccccatgaggttctcgtgccagcgccggacccgtttcatctccctgggcgaggcgtgcaagaaggtcttcctggactgctgcaactacatcacagagctgcggcggcagcacgcgcgggccagccacctgggcctggccaggagtaggtcccacggggtggggacagggggagggggccgtctgatgggggaggagactcctgtctgaggagggaggatgccctgtctggtgggggtggggctggaggaggccgctgtctgaggggggaggaggcccctgtctgagggggcaggaggtccctgtctcaggggggaggaggcccctgtctgaggagggaggaaacctccgtctgaggagggaggaggtccctgtctgaggagggaggaggccttgaggggggaggaggtccccgtctgaggagggaggaggcctctgtctgaggagagaggaggtacctgtctgaggggggaggaggcctctgtctgaggggggaggatgcccctgtctgagggggtaggaggaggcctctgtctcggggggaggagtcccctgtctgaggagggaggaggcctctgtctgaggggggaggatgccgctgtctgagagggtaggaggaggcctctgtctgttgggagaggaggcccctgtctgagggtgatgccgatgaggtgatgccctgccagcgtgaggtagagaagacccaggtctgaagaggggaggatcaagtcagagaagcgtagatgcccatctgagatggaggaggctcccgtccgaggggaggggacactcctgtctggaagggacagaggccttcagatgaggagccaggaggcccaggcctgagggaggagaagggcctagtctgatggggagaagggcccttgcctgaaggcagagcagtttcctgcctgggaaggtcatcccagccccacccatcagtctgaattggacatcaccagtgcccaggacattggaggtctgagggaaaagtctagaaagatgatggggctggtcacacactaattaccaatgggaaagctaaggtgagttccaagtttggcttcaccagagaaaactaatttgtgtggcattccagaaagacctgccaaactcgatgagtgaacaggcagcccttcttcattcatgcatgcattcagtttttgaatcaggtgagactttagatctcacgtgaaataagtcttaagtgaaacaaagagaaatttatcttataataagagaaaattggccgggcatggtggctcacaccggcaatcgcagcactttgggaggccgaggtggatggatcacttgaggtcaggagttcaagactagtctggccaacatggtgaaaccccgtctctactaaaaatgcaaaaatagcctggcgagctggcaggcgcctgtaatcccagctactcaggaggctgaggtgggagaatcgcttgaacctggtaggtttaggttgcagtgagctgagattgtgccactgcactccagcctgggcaacagagcaagactccgtctcaaaaacaaaacaaaacaaaacaaaaaaagaaaggaaaaagaaaattggccgggcacggtggctcacacctgtaatgcccacactttgcgaggccgagaagggtggattgcttgagtccagaaatttgagaccagcctgggcaacatggcagaaccccatatctacaaaaataaaataaaataattagccgggtgtgggggtgcacacctgtagtcccagctactcaggaggctgaggtgggaggatcgtttgaacccaggagatggaggcgtcaatgagccaaaatcacaccaccgcactccagcctgggcaacagagcaagaccctgtctcaaaaaagaaaaaaaaaaaaagagagagaaaagaaaagaaaatgaaaagaaaaaattcaagcaaatttagaatgatctccttcacaaagaggcgatagtgtgagggtcactgggaaaattagacaaaaagtctggtctactgaaatatggtttacatccacatggatggtgggctgtacttttctccagaattgtgtaattcctttggcccattgggggtcagaaaaagaatggctaaatgttactatcccaagacacttggattgattattccagagtgtgagtaaattcaggtatctcttttaggaattccatctactttgggctgggcttagtggctcacacctgtgatcccagcactttgggaggctgaggcagcgggatcgcttgagctctggagtttgagagcagtctgggcagcgtagtgagactttgtacggacgaaaacttttttttttttttttgagatggaatcttgctctgtcacccaggctgaagtacagtggcacaacctcggctcaccgcaacctccacctcatgggttcaagcgattctcctgcctcagcctcctgagtagctgagattattattatttgtttttttgagatggagtctcgctctgtcacacaggctgcagtacagtggtgcaatcttggctcactacaacctccgcctcccgtgttcaagtgattctcctgcctcagcctcccaagtagctgggattacaggcacctgccaccacacccagctaatttttgtatttttagtagaaaagaggtttcaccgtgttggccaggctggtgtcgaactcccaaccttcggggatctgcccgcctccgcctcccaaagtattgggattacaggcatgagccactgtgcctggctgaaaaatattaaaatatatatattttttaagggattccagctactttgttgttatggagatccagaacccaattaaagcctgtctatcatgtttgaggaaagtgcagtttgagtcaaagcctagtccagtccaatttcatttacttgctggtagtgtcaagctgtttttgtttatttatatatttatttagaggcaggatcttgctctttcgcccaggctggagtgcagtggtgcgatcacagctcactgcagcgtcaacctcttgggctcaaggagtccttctgtctcatcctcagccttctgagtagctaggactacaggtgcatgccagcatgcccagctaatttttaaattattatttgtagagagagggtctcagtgtgttgcccaggctggtctcaaactcctgggctcaagccatcctcccaccttggcctctcagagcgctgggatgatagcaccacatccagcctatcgagattttttttgtgtttttttctttgttttttgtttgtttgtttgtttgtttgagagggagtctcgctctgtcgccaggctggagtgcagttgcgcagtctcggctcactgtaacctccgcctcctggattcaagagattctcatccctcagcctcccgagtagctgggattacaggcgcatgccatcacacccagctaatttttgtattaggtggtttttaaaggccaccgcttcttcagtgttctgcaccaggtctgggaatgttctcagctcacctagtcatgttcagaatggacaaatccctcagaggaagcagacacggtttctcgggacggtgatcctttagagccacatgcacatgcttgctttcttttattattatctttttttgagatggagtctcactccgtcaccgaggctggagtgcagtggcataatcttggctcactacaacctctgcctcccgggttcaagcgattctcctgcctcagcctcccgagtatctgggactacaggtgcccgctgccaagcctggctaattttcatatttttagtagaggcgcggttttgccacattggccaggctgtctcgaactcctgacctcaagtgatccacccgcctcggcctcccaaagtgctggaattacagatgtgagccactgtgcctggccaaatgctttcgtttctttaaaaatcaaagggaaaggaatgactataatccagtctgcattgtatatgtccttataccagtacatttgtgggatataatttttagttctttttatggagaagaagttcccaaggcagatgtgtctggggctcgtgaaaattcatcctgaagtcctccatgtccgggatgtatttcactgctaggaatccctcctgggcagaggtaggatctaaaggtgtgaccgctgaggaagtaggtcggctctctttttgtttgttttttgtttttgttttcagatggagtctgtctctgtcgcctgggctggagtgtagtcgtgtgatctcagctcactgcaacctccacctcctgggttcaagtgattctgctgcctcagcctccacagtagctgggatcacaggcacgcgccaccacacccagctaatttttgtgtttttagtagagatggggtttcaccatgttgtccaggctggtctcaaagtcctgacctcaagcgatccacccacctcagcctcccaaagtgctgggattacaggggtgagccaccgtgcccagccttaatttttgtatttttagtagagatgggtttcaccatgttagctaggctggtctccaactcctggcctcaagtgatccacctgccttggcctccctaagtgctgggatttcaggcatgagccatggcaactggcctgctctgttctaaatgcagatctaaaccccctgcaggtaacctggatgaggacatcattgcagaagagaacatcgtttcccgaagtgagttcccagagagctggctgtggaacgttgaggacttgaaagagccaccgaaaaatgggtaaggccggggtacccccggtacaacccaccccagagtcagaccgtttaatttgcatgcacctgctatctctggtcttctctggaatcacagtgcaaccccacagcccaacctagaaaaatcaggaattgggtgacctacatggaggcacccccagacccttccagcctgtcccttggggtccctctgcaccagttcttcccctctaccaccctgctagatgacatctcctaataccccaacctcttctccatccagaatctctacgaagctcatgaatatatttttgaaagactccatcaccacgtgggagattctggctgtgagcatgtcggacaagaaaggtgagagaggatgctggctggtccccgggaggcagggaccccagggtgtctgagtgtcatctcattttatccaaactcaatcaaccctatgtttcttggcactttattctctgccctggttaccacagaggtgttgttaccaggaactgtgggaatccttagttcctgtctaacttggaagaaagaattcagccaagagtcacatagcaagggttaagtagcagagtttattgaaggaagaaacagctctgggctggtccccctggaaaaatagtagtagcaatgcttatttaaagagacagggccagcctcgatggctcacacctataatcccagcactttgggaggctgaggcaggggaatcacttcaggtcaggagttcaagaccagcctggtcaacgtggtgaaaccccgtctctactgaaagtacaaaacaattagccaggcagggggtggcgggcgcctataatcccagctactcgggaggctgaggcaggagatttggttgaacccgggaggtggaggttgcggtgagctgagattgtgccactgcactccagcctgggcaacaagagcaaaactccttctctaaataaataaaaagtgaccgtatgctctgaaagacgacacagacatggctgctcaacagaacgagccagcagcagatactgctggtagactctttttatgagactcttacatgatttttcgtgaaggggcgtgagtgggtgtcacttgtaagcatgttttgggaggtctctttgggcgagcaggctctgtggctgtaggtactagcatgcacgtggcatgtctcattagcatcgaaaatctccacccagaggtgtgttttttactatgataatgagcaaaacacaactctagggtgttttcggagcagtgcacatgctcatcatcggggaaaatccctagcaaagttatttccagctaggacctgataagtccccttcagggccagaggaccccaaccacaaggccatgtgtagctaaagtagccatcgtccttttcgctgactgccagtgagcagcgctgtcagtaggcagcctgtctgggacttcttttcccagaaagctcccctgcctgctcatttccgcctatctgcctactctaacagtgtcaaaagctagacagggtgggggtacagtctctaaaattgatgcttttctttctttcttttgtttttgagaaggagtctcactcggtcatccagccataatttatatggtttattataatttataataaatttaattataatatttatttatatatttattaattgtaatgtttataattataatatataattatatattacataatatatttcatatctacatatcacatattacatatgcaatatattatataccacatattacatatataacataccacatattacatatataatatatcatatattatatattacatatataatatatcatatattatatattacatatataatatatcatatattatatattacatatataatatatcatatattatatattacatatataatatatcatatattacatatattatatattacatatataatatatcatattacatatattatatattacatatataatatatcatattacatatattatatattacatatataacatatatattacatatatcatattacatatatcatatattacatatataatatatcatattacatatatatcatatattacatatataatatatcatattacatatatatcatatattacatattacatgtaatatgttatattacatataatatatattgcatatcacatatataatatgttatatgttgcatattacatatataatatattatatattgtatattacatatataatatatatgtaatatatacatattacacatgtaatatattatgtaaacatataatatgtattataatttataagaaatttaattataatataatttaatgaattataataaaccataattcattataatttaatacattataataaaccataatttattataatttaattttgttgtaatgtataattataatttactactaatatgtcatttgttattgttgacatgttaacatatataatgtatattttattagatatataatataaatgatgtatcatttattattgattacatatctataattataccatatcataacttattacaaaacattctatttaatttaaatatacccaaaatagtatcatttcaacattttgtaaaaagttgcaaaaccacaacccactaataatgtgactataaccttttaatatttgataataatctactagtatatcaaaattactgatgatatattttacttctgtttgcactaagtcttcaaaatccagcatgtgttttacaattcagtgcatctcatttaggatactagattttctttcttttttttttttgatacaggagcttgctctgtcacctaggatggagtgcagtggtgtaaacaggatgctaagttttctttttttagtagagacagggtgtcaccatgttggccaggctggtctcaaactcctggcctcaagcaatctgccttcctcagcctcccagagtgctggaattacaggcgtgagccaccgcgcccagcgcaggatgctaggttttcactggaaatactttgatctgtattttaggtttcataaaatttacagttgaaaaggtagattctcaggccgggtgcaaaggctcaagcctgtaatcccattactttcagaggctgaggccggcaaatcatttgaggtcggagtttgagaccagcctgggcaacatggcaaagccccgtctctacaaaaaaaaaaaagaaaagaaaagaaaagagaaagaaaaggtagatcctcatactcaagtagttgcaaaaatacttaaacgttttccactcaatcatcatttttaaaaaattaagatttaattcacttactatatgtcacccttttaaaatgtacaactcaggtcgggcacggtggctcacacctgtaatcccagcactttgggaggcccaggcaggcagatcacctgaggtcaggaggtggagaacagcctggccaacatggtgaaaccctgtctctactaaaaatacaaaaaattagcaggacatgcgggtgggtgcctgtaatcccagctactcaggaggctgaggcaggagaattgcttgaacccaggatatagaggttgtagtgagccaagatcacgccactgcactccagcctgggtgacagagcgagaccccatctcaaaaaataaataaataaaaaataataaaatatataattcagtggtgtttcatatatttaaaatgagcatcagttgtttgttttgtttcattgggtttggttttacagacaggatctcactctgttgcccaggctggagcacagtggtgcgatcatagctcactgcagccttgaactcctgggctcaagcaatcctcctgcctcagcctcccaaagtgctgtgattacaggcatgagccaccgcacctagctagatcatcaggtttaaagtttaagtctgaattaaattaaatacatttaaatacaagtacatcaaataaaagtacaaatccagtttctcactcaggcaaaccccatttcaagtgctcagcgctcccccacagcttggggctaccatatcagacaagcagatatattttggagatttctcttcctccctacacgtagatctctgagtcaaactacaaacagaatgtaaatcattaaatagtggtaactccggccaggcgcagtggctcacgcctgtaatctcagcacttgggaggctgaggcgggtggatcgtgaggtcaagagatcgagaccatcctggccaacatggtgaaaccccatctctactaaatatacaaaaattagctggacatggtggtgcgtgcctgcagtcccagctactcgagaggctgaggcaggagaattgcttgaacccaggaggcggaggttgcgttgagccgagatggcgccactgcactccagcctggcgacagagtcttgctctgtctcaaataattaataataataataataataataataataataataataaataatggtaactcccagccaccaccatcatcatctgtcatttgtcgccattgacagcgtttagttcacaggcttcagcaaagacaggctgagttagggagagctcctgcggagtggactaagagctgagacccaggagcctggccttgtccactccccgaccttgacactccgtgttctgtctctgcccgagc

SEQ ID NO: 796 - protein, 1663 aa, Homo sapiens
MGPTSGPSLLLLLLTHLPLALGSPMYSIITPNILRLESEETMVLEAHDAQGDVPVTVTVHDFPGKKLVLSSEKTVLTPATNHMGNVTFTIPANREFKSEKGRNKFVTVQATFGTQVVEKVVLVSLQSGYLFIQTDKTIYTPGSTVLYRIFTVNHKLLPVGRTVMVNIENPEGIPVKQDSLSSQNQLGVLPLSWDIPELVNMGQWKIRAYYENSPQQVFSTEFEVKEYVLPSFEVIVEPTEKFYYIYNEKGLEVTITARFLYGKKVEGTAFVIFGIQDGEQRISLPESLKRIPIEDGSGEVVLSRKVLLDGVQNPRAEDLVGKSLYVSATVILHSGSDMVQAERSGIPIVTSPYQIHFTKTPKYFKPGMPFDLMVFVTNPDGSPAYRVPVAVQGEDTVQSLTQGDGVAKLSINTHPSQKPLSITVRTKKQELSEAEQATRTMQALPYSTVGNSNNYLHLSVLRTELRPGETLNVNFLLRMDRAHEAKIRYYTYLIMNKGRLLKAGRQVREPGQDLVVLPLSITTDFIPSFRLVAYYTLIGASGQREVVADSVWVDVKDSCVGSLVVKSGQSEDRQPVPGQQMTLKIEGDHGARVVLVAVDKGVFVLNKKNKLTQSKIWDVVEKADIGCTPGSGKDYAGVFSDAGLTFTSSSGQQTAQRAELQCPQPAARRRRSVQLTEKRMDKVGKYPKELRKCCEDGMRENPMRFSCQRRTRFISLGEACKKVFLDCCNYITELRRQHARASHLGLARSNLDEDIIAEENIVSRSEFPESWLWNVEDLKEPPKNGISTKLMNIFLKDSITTWEILAVSMSDKKGICVADPFEVTVMQDFFIDLRLPYSVVRNEQVEIRAVLYNYRQNQELKVRVELLHNPAFCSLATTKRRHQQTVTIPPKSSLSVPYVIVPLKTGLQEVEVKAAVYHHFISDGVRKSLKVVPEGIRMNKTVAVRTLDPERLGREGVQKEDIPPADLSDQVPDTESETRILLQGTPVAQMTEDAVDAERLKHLIVTPSGCGEQNMIGMTPTVIAVHYLDETEQWEKFGLEKRQGALELIKKGYTQQLAFRQPSSAFAAFVKRAPSTWLTAYVVKVFSLAVNLIAIDSQVLCGAVKWLILEKQKPDGVFQEDAPVIHQEMIGGLRNNNEKDMALTAFVLISLQEAKDICEEQVNSLPGSITKAGDFLEANYMNLQRSYTVAIAGYALAQMGRLKGPLLNKFLTTAKDKNRWEDPGKQLYNVEATSYALLALLQLKDFDFVPPVVRWLNEQRYYGGGYGSTQATFMVFQALAQYQKDAPDHQELNLDVSLQLPSRSSKITHRIHWESASLLRSEETKENEGFTVTAEGKGQGTLSVVTMYHAKAKDQLTCNKFDLKVTIKPAPETEKRPQDAKNTMILEICTRYRGDQDATMSILDISMMTGFAPDTDDLKQLANGVDRYISKYELDKAFSDRNTLIIYLDKVSHSEDDCLAFKVHQYFNVELIQPGAVKVYAYYNLEESCTRFYHPEKEDGKLNKLCRDELCRCAEENCFIQKSDDKVTLEERLDKACEPGVDYVYKTRLVKVQLSNDFDEYIMAIEQTIKSGSDEVQVGQQRTFISPIKCREALKLEEKKHYLMWGLSSDFWGEKPNLSYIIGKDTWVEHWPEEDECQDEENQKQCQDLGAFTESMVVFGCPN

SEQ ID NO: 797 - DNA, 21 bp, synthetic construct
  source 1..21: mol_type = other DNA
atggtaccggaatgcgcttga

SEQ ID NO: 798 - DNA, 22 bp, synthetic construct
  source 1..22: mol_type = other DNA
tatggtaccggaatgcgcttga

SEQ ID NO: 799 - DNA, 23 bp, synthetic construct
  source 1..23: mol_type = other DNA
ctatggtaccggaatgcgcttga

SEQ ID NO: 800 - DNA, 19 bp, synthetic construct
  source 1..19: mol_type = other DNA
ggtaccggaatgcgcttga

SEQ ID NO: 801 - DNA, 21 bp, synthetic construct
  source 1..21: mol_type = other DNA
cccgcagaggaaagctgtacc

SEQ ID NO: 802 - DNA, 22 bp, synthetic construct
  source 1..22: mol_type = other DNA
gcccgcagaggaaagctgtacc

SEQ ID NO: 803 - DNA, 23 bp, synthetic construct
  source 1..23: mol_type = other DNA
tgcccgcagaggaaagctgtacc

SEQ ID NO: 804 - DNA, 19 bp, synthetic construct
  source 1..19: mol_type = other DNA
cgcagaggaaagctgtacc

SEQ ID NO: 805 - DNA, 21 bp, synthetic construct
  source 1..21: mol_type = other DNA
actgtacctcttctgatcgca

SEQ ID NO: 806 - DNA, 22 bp, synthetic construct
  source 1..22: mol_type = other DNA
gactgtacctcttctgatcgca

SEQ ID NO: 807 - DNA, 23 bp, synthetic construct
  source 1..23: mol_type = other DNA
tgactgtacctcttctgatcgca

SEQ ID NO: 808 - DNA, 19 bp, synthetic construct
  source 1..19: mol_type = other DNA
tgtacctcttctgatcgca

SEQ ID NO: 809 - DNA, 21 bp, synthetic construct
  source 1..21: mol_type = other DNA
ccttttacctgtttccggtgc

SEQ ID NO: 810 - DNA, 22 bp, synthetic construct
  source 1..22: mol_type = other DNA
tccttttacctgtttccggtgc

SEQ ID NO: 811 - DNA, 23 bp, synthetic construct
  source 1..23: mol_type = other DNA
ttccttttacctgtttccggtgc

SEQ ID NO: 812 - DNA, 19 bp, synthetic construct
  source 1..19: mol_type = other DNA
ttttacctgtttccggtgc

SEQ ID NO: 813 - DNA, 21 bp, synthetic construct
  source 1..21: mol_type = other DNA
tcttacctggtacagatctca

SEQ ID NO: 814 - DNA, 22 bp, synthetic construct
  source 1..22: mol_type = other DNA
ttcttacctggtacagatctca

SEQ ID NO: 815 - DNA, 23 bp, synthetic construct
  source 1..23: mol_type = other DNA
cttcttacctggtacagatctca

SEQ ID NO: 816 - DNA, 19 bp, synthetic construct
  source 1..19: mol_type = other DNA
ttacctggtacagatctca

SEQ ID NO: 817 - DNA, 21 bp, synthetic construct
  source 1..21: mol_type = other DNA
cccgcagatctgggacgtggt

SEQ ID NO: 818 - DNA, 22 bp, synthetic construct
  source 1..22: mol_type = other DNA
ccccgcagatctgggacgtggt

SEQ ID NO: 819 - DNA, 23 bp, synthetic construct
  source 1..23: mol_type = other DNA
cccccgcagatctgggacgtggt

SEQ ID NO: 820 - DNA, 19 bp, synthetic construct
  source 1..19: mol_type = other DNA
cgcagatctgggacgtggt

SEQ ID NO: 821 - DNA, 21 bp, synthetic construct
  source 1..21: mol_type = other DNA
tatccaggtaccggggagacc

SEQ ID NO: 822 - DNA, 22 bp, synthetic construct
  source 1..22: mol_type = other DNA
ctatccaggtaccggggagacc

SEQ ID NO: 823 - DNA, 23 bp, synthetic construct
  source 1..23: mol_type = other DNA
actatccaggtaccggggagacc

SEQ ID NO: 824 - DNA, 19 bp, synthetic construct
  source 1..19: mol_type = other DNA
tccaggtaccggggagacc

SEQ ID NO: 825 - RNA, 21 nt, synthetic construct
  source 1..21: mol_type = other RNA
atggtaccggaatgcgcttga

SEQ ID NO: 826 - RNA, 22 nt, synthetic construct
  source 1..22: mol_type = other RNA
tatggtaccggaatgcgcttga

SEQ ID NO: 827 - RNA, 23 nt, synthetic construct
  source 1..23: mol_type = other RNA
ctatggtaccggaatgcgcttga

SEQ ID NO: 828 - RNA, 19 nt, synthetic construct
  source 1..19: mol_type = other RNA
ggtaccggaatgcgcttga

SEQ ID NO: 829 - RNA, 21 nt, synthetic construct
  source 1..21: mol_type = other RNA
cccgcagaggaaagctgtacc

SEQ ID NO: 830 - RNA, 22 nt, synthetic construct
  source 1..22: mol_type = other RNA
gcccgcagaggaaagctgtacc

SEQ ID NO: 831 - RNA, 23 nt, synthetic construct
  source 1..23: mol_type = other RNA
tgcccgcagaggaaagctgtacc

SEQ ID NO: 832 - RNA, 19 nt, synthetic construct
  source 1..19: mol_type = other RNA
cgcagaggaaagctgtacc

SEQ ID NO: 833 - RNA, 21 nt, synthetic construct
  source 1..21: mol_type = other RNA
actgtacctcttctgatcgca

SEQ ID NO: 834 - RNA, 22 nt, synthetic construct
  source 1..22: mol_type = other RNA
gactgtacctcttctgatcgca

SEQ ID NO: 835 - RNA, 23 nt, synthetic construct
  source 1..23: mol_type = other RNA
tgactgtacctcttctgatcgca

SEQ ID NO: 836 - RNA, 19 nt, synthetic construct
  source 1..19: mol_type = other RNA
tgtacctcttctgatcgca

SEQ ID NO: 837 - RNA, 21 nt, synthetic construct
  source 1..21: mol_type = other RNA
ccttttacctgtttccggtgc

SEQ ID NO: 838 - RNA, 22 nt, synthetic construct
  source 1..22: mol_type = other RNA
tccttttacctgtttccggtgc

SEQ ID NO: 839 - RNA, 23 nt, synthetic construct
  source 1..23: mol_type = other RNA
ttccttttacctgtttccggtgc

SEQ ID NO: 840 - RNA, 19 nt, synthetic construct
  source 1..19: mol_type = other RNA
ttttacctgtttccggtgc

SEQ ID NO: 841 - RNA, 21 nt, synthetic construct
  source 1..21: mol_type = other RNA
tcttacctggtacagatctca

SEQ ID NO: 842 - RNA, 22 nt, synthetic construct
  source 1..22: mol_type = other RNA
ttcttacctggtacagatctca

SEQ ID NO: 843 - RNA, 23 nt, synthetic construct
  source 1..23: mol_type = other RNA
cttcttacctggtacagatctca

SEQ ID NO: 844 - RNA, 19 nt, synthetic construct
  source 1..19: mol_type = other RNA
ttacctggtacagatctca

SEQ ID NO: 845 - RNA, 21 nt, synthetic construct
  source 1..21: mol_type = other RNA
cccgcagatctgggacgtggt

SEQ ID NO: 846 - RNA, 22 nt, synthetic construct
  source 1..22: mol_type = other RNA
ccccgcagatctgggacgtggt

SEQ ID NO: 847 - RNA, 23 nt, synthetic construct
  source 1..23: mol_type = other RNA
cccccgcagatctgggacgtggt

SEQ ID NO: 848 - RNA, 19 nt, synthetic construct
  source 1..19: mol_type = other RNA
cgcagatctgggacgtggt

SEQ ID NO: 849 - RNA, 21 nt, synthetic construct
  source 1..21: mol_type = other RNA
tatccaggtaccggggagacc

SEQ ID NO: 850 - RNA, 22 nt, synthetic construct
  source 1..22: mol_type = other RNA
ctatccaggtaccggggagacc

SEQ ID NO: 851 - RNA, 23 nt, synthetic construct
  source 1..23: mol_type = other RNA
actatccaggtaccggggagacc

SEQ ID NO: 852 - RNA, 19 nt, synthetic construct
  source 1..19: mol_type = other RNA
tccaggtaccggggagacc

SEQ ID NO: 853 - protein, 13 aa, synthetic construct
ICVVQDWGHHRCT

SEQ ID NO: 854 - protein, 13 aa, synthetic construct
ICVWQDWGAHRCT

SEQ ID NO: 855 - RNA, 100 nt, synthetic construct
  source 1..100: mol_type = other RNA
nnnnnnnnnnnnnnnnnnnngttttagagctagaaatagcaagttaaaataaggctagtccgttatcaacttgaaaaagtggcaccgagtcggtgctttt

SEQ ID NO: 856 - RNA, 100 nt, synthetic construct; identical to SEQ ID NO: 855
  source 1..100: mol_type = other RNA

SEQ ID NO: 857 - RNA, 100 nt, synthetic construct; identical to SEQ ID NO: 855
  source 1..100: mol_type = other RNA

SEQ ID NO: 858 - protein, 19 aa, synthetic construct
CKRTADGSEFESPKKKRKV

SEQ ID NO: 859 - RNA, 106 nt, synthetic construct
  source 1..106: mol_type = other RNA
nnnnnnnnnnnnnnnnnnnngttttagagccggcggaaacgccggcaagttaaaataaggctagtccgttatcaacttgaaaaagtggcaccgagtcggtgctttt

SEQ ID NO: 860 - RNA, 106 nt, synthetic construct; identical to SEQ ID NO: 859
  source 1..106: mol_type = other RNA

SEQ ID NO: 861 - RNA, 114 nt, synthetic construct
  source 1..114: mol_type = other RNA
nnnnnnnnnnnnnnnnnnnngttttagagccggcggaaacgccggcaagttaaaataaggctagtccgttatcaacttggacttcggtccaagtggcaccgagtcggtgctttt

SEQ ID NO: 862 - DNA, 20 bp, synthetic construct
  source 1..20: mol_type = other DNA
tggtaccggaatgcgcttga

SEQ ID NO: 863 - DNA, 20 bp, synthetic construct
  source 1..20: mol_type = other DNA
tggtaccggaatgcgcttga

SEQ ID NO: 864 - DNA, 20 bp, synthetic construct
  source 1..20: mol_type = other DNA
tggtaccggaatgcgcttga

SEQ ID NO: 865 - DNA, 20 bp, synthetic construct
  source 1..20: mol_type = other DNA
tggtaccggaatgcgcttga

SEQ ID NO: 866 - DNA, 20 bp, synthetic construct
  source 1..20: mol_type = other DNA
ccgcagaggaaagctgtacc

SEQ ID NO: 867 - DNA, 20 bp, synthetic construct
  source 1..20: mol_type = other DNA
ccgcagaggaaagctgtacc

SEQ ID NO: 868 - DNA, 20 bp, synthetic construct
  source 1..20: mol_type = other DNA
ccgcagaggaaagctgtacc

SEQ ID NO: 869 - DNA, 20 bp, synthetic construct
  source 1..20: mol_type = other DNA
ccgcagaggaaagctgtacc

SEQ ID NO: 870 - DNA, 20 bp, synthetic construct
  source 1..20: mol_type = other DNA
tggtaccggaatgcgcttga

SEQ ID NO: 871 - DNA, 20 bp, synthetic construct
  source 1..20: mol_type = other DNA
tggtaccggaatgcgcttga

SEQ ID NO: 872 - DNA, 20 bp, synthetic construct
  source 1..20: mol_type = other DNA
cttacctggtacagatctca

SEQ ID NO: 873 - DNA, 20 bp, synthetic construct
  source 1..20: mol_type = other DNA
cttacctggtacagatctca

SEQ ID NO: 874 - DNA, 20 bp, synthetic construct
  source 1..20: mol_type = other DNA
ccgcagatctgggacgtggt

SEQ ID NO: 875 - DNA, 20 bp, synthetic construct
  source 1..20: mol_type = other DNA
ccgcagatctgggacgtggt

SEQ ID NO: 876 - RNA, 20 nt, synthetic construct
  source 1..20: mol_type = other RNA
tggtaccggaatgcgcttga

SEQ ID NO: 877 - RNA, 20 nt, synthetic construct
  source 1..20: mol_type = other RNA
tggtaccggaatgcgcttga

SEQ ID NO: 878 - RNA, 20 nt, synthetic construct
  source 1..20: mol_type = other RNA
tggtaccggaatgcgcttga

SEQ ID NO: 879 - RNA, 20 nt, synthetic construct
  source 1..20: mol_type = other RNA
tggtaccggaatgcgcttga

SEQ ID NO: 880 - RNA, 20 nt, synthetic construct
  source 1..20: mol_type = other RNA
ccgcagaggaaagctgtacc

SEQ ID NO: 881 - RNA, 20 nt, synthetic construct
  source 1..20: mol_type = other RNA
ccgcagaggaaagctgtacc

SEQ ID NO: 882 - RNA, 20 nt, synthetic construct
  source 1..20: mol_type = other RNA
ccgcagaggaaagctgtacc

SEQ ID NO: 883 - RNA, 20 nt, synthetic construct
  source 1..20: mol_type = other RNA
ccgcagaggaaagctgtacc

SEQ ID NO: 884 - RNA, 20 nt, synthetic construct
  source 1..20: mol_type = other RNA
tggtaccggaatgcgcttga

SEQ ID NO: 885 - RNA, 20 nt, synthetic construct
  source 1..20: mol_type = other RNA
tggtaccggaatgcgcttga

SEQ ID NO: 886 - RNA, 20 nt, synthetic construct
  source 1..20: mol_type = other RNA
cttacctggtacagatctca

SEQ ID NO: 887 - RNA, 20 nt, synthetic construct
  source 1..20: mol_type = other RNA
cttacctggtacagatctca

SEQ ID NO: 888 - RNA, 20 nt, synthetic construct
  source 1..20: mol_type = other RNA
ccgcagatctgggacgtggt

SEQ ID NO: 889 - RNA, 20 nt, synthetic construct
  source 1..20: mol_type = other RNA
ccgcagatctgggacgtggt

SEQ ID NO: 890 - DNA, 20 bp, synthetic construct
  source 1..20: mol_type = other DNA
tgctacctggatgcgcttga

SEQ ID NO: 891 - DNA, 20 bp, synthetic construct
  source 1..20: mol_type = other DNA
ctgcagcggaaagctgtacc

SEQ ID NO: 892 - DNA, 20 bp, synthetic construct
  source 1..20: mol_type = other DNA
tgctacctggatgcgcttga

SEQ ID NO: 893 - DNA, 20 bp, synthetic construct
  source 1..20: mol_type = other DNA
tgctacctggatgcgcttga

SEQ ID NO: 894 - RNA, 20 nt, synthetic construct
  source 1..20: mol_type = other RNA
tgctacctggatgcgcttga

SEQ ID NO: 895 - RNA, 20 nt, synthetic construct
  source 1..20: mol_type = other RNA
ctgcagcggaaagctgtacc

SEQ ID NO: 896 - RNA, 20 nt, synthetic construct
  source 1..20: mol_type = other RNA
tgctacctggatgcgcttga

SEQ ID NO: 897 - RNA, 20 nt, synthetic construct
  source 1..20: mol_type = other RNA
tgctacctggatgcgcttga

SEQ ID NO: 898 - DNA, 20 bp, synthetic construct
  source 1..20: mol_type = other DNA
ccatggtgctgggacagtgc

SEQ ID NO: 899 - DNA, 20 bp, synthetic construct
  source 1..20: mol_type = other DNA
agcaccatgggacccacctc

SEQ ID NO: 900 - DNA, 20 bp, synthetic construct
  source 1..20: mol_type = other DNA
gtcccatggtgctgggacag

SEQ ID NO: 901 - DNA, 21 bp, synthetic construct
  source 1..21: mol_type = other DNA
tcccatggtgctgggacagtg

SEQ ID NO: 902 - DNA, 21 bp, synthetic construct
  source 1..21: mol_type = other DNA
aggtgggtcccatggtgctgg

SEQ ID NO: 903 - DNA, 21 bp, synthetic construct
  source 1..21: mol_type = other DNA
cccagcaccatgggacccacc

SEQ ID NO: 904 - DNA, 20 bp, synthetic construct
  source 1..20: mol_type = other DNA
tgaggtgggtcccatggtgc

SEQ ID NO: 905 - DNA, 20 bp, synthetic construct
  source 1..20: mol_type = other DNA
gaggtgggtcccatggtgct

SEQ ID NO: 906 - DNA, 20 bp, synthetic construct
  source 1..20: mol_type = other DNA
aggtgggtcccatggtgctg

SEQ ID NO: 907 - DNA, 20 bp, synthetic construct
  source 1..20: mol_type = other DNA
gctggagctggctttttatc

SEQ ID NO: 908 - DNA, 20 bp, synthetic construct
  source 1..20: mol_type = other DNA
gataaaaagccagctccagc

SEQ ID NO: 909 - DNA, 20 bp, synthetic construct
  source 1..20: mol_type = other DNA
ctggagctggctttttatct

SEQ ID NO: 910 - DNA, 20 bp, synthetic construct
  source 1..20: mol_type = other DNA
ctggctttttatctggctcc

SEQ ID NO: 911 - DNA, 20 bp, synthetic construct
  source 1..20: mol_type = other DNA
ctcctgcctttcccccactc

SEQ ID NO: 912 - DNA, 20 bp, synthetic construct
  source 1..20: mol_type = other DNA
aaggcaggagccagataaaa

SEQ ID NO: 913 - DNA, 20 bp, synthetic construct
  source 1..20: mol_type = other DNA
caggagccagataaaaagcc

SEQ ID NO: 914 - DNA, 20 bp, synthetic construct
  source 1..20: mol_type = other DNA
ccagataaaaagccagctcc

SEQ ID NO: 915 - DNA, 20 bp, synthetic construct
  source 1..20: mol_type = other DNA
ataaaaagccagctccagca

SEQ ID NO: 916 - DNA, 20 bp, synthetic construct
  source 1..20: mol_type = other DNA
aaaaagccagctccagcagg

SEQ ID NO: 917 - DNA, 20 bp, synthetic construct
  source 1..20: mol_type = other DNA
aagccagctccagcaggcgc

SEQ ID NO: 918 - DNA, 20 bp, synthetic construct
  source 1..20: mol_type = other DNA
gtgggggaaaggcaggagcc

SEQ ID NO: 919 - RNA, 20 nt, synthetic construct
  source 1..20: mol_type = other RNA
ccatggtgctgggacagtgc

SEQ ID NO: 920 - RNA, 20 nt, synthetic construct
  source 1..20: mol_type = other RNA
agcaccatgggacccacctc

SEQ ID NO: 921 - RNA, 20 nt, synthetic construct
  source 1..20: mol_type = other RNA
gtcccatggtgctgggacag

SEQ ID NO: 922 - RNA, 21 nt, synthetic construct
  source 1..21: mol_type = other RNA
tcccatggtgctgggacagtg

SEQ ID NO: 923 - RNA, 21 nt, synthetic construct
  source 1..21: mol_type = other RNA
aggtgggtcccatggtgctgg

SEQ ID NO: 924 - RNA, 21 nt, synthetic construct
  source 1..21: mol_type = other RNA
cccagcaccatgggacccacc

SEQ ID NO: 925 - RNA, 20 nt, synthetic construct
  source 1..20: mol_type = other RNA
tgaggtgggtcccatggtgc

SEQ ID NO: 926 - RNA, 20 nt, synthetic construct
  source 1..20: mol_type = other RNA
gaggtgggtcccatggtgct

SEQ ID NO: 927 - RNA, 20 nt, synthetic construct
  source 1..20: mol_type = other RNA
aggtgggtcccatggtgctg

SEQ ID NO: 928 - RNA, 20 nt, synthetic construct
  source 1..20: mol_type = other RNA
gctggagctggctttttatc

SEQ ID NO: 929 - RNA, 20 nt, synthetic construct
  source 1..20: mol_type = other RNA
gataaaaagccagctccagc

SEQ ID NO: 930 - RNA, 20 nt, synthetic construct
  source 1..20: mol_type = other RNA
ctggagctggctttttatct

SEQ ID NO: 931 - RNA, 20 nt, synthetic construct
  source 1..20: mol_type = other RNA
ctggctttttatctggctcc

SEQ ID NO: 932 - RNA, 20 nt, synthetic construct
  source 1..20: mol_type = other RNA
ctcctgcctttcccccactc

SEQ ID NO: 933 - RNA, 20 nt, synthetic construct
  source 1..20: mol_type = other RNA
aaggcaggagccagataaaa

SEQ ID NO: 934 - RNA, 20 nt, synthetic construct
  source 1..20: mol_type = other RNA
caggagccagataaaaagcc

SEQ ID NO: 935 - RNA, 20 nt, synthetic construct
  source 1..20: mol_type = other RNA
ccagataaaaagccagctcc

SEQ ID NO: 936 - RNA, 20 nt, synthetic construct
  source 1..20: mol_type = other RNA
ataaaaagccagctccagca

SEQ ID NO: 937 - RNA, 20 nt, synthetic construct
  source 1..20: mol_type = other RNA
aaaaagccagctccagcagg

SEQ ID NO: 938 - RNA, 20 nt, synthetic construct
  source 1..20: mol_type = other RNA
aagccagctccagcaggcgc

SEQ ID NO: 939 - RNA, 20 nt, synthetic construct
  source 1..20: mol_type = other RNA
gtgggggaaaggcaggagcc

SEQ ID NO: 940 - protein, 12 aa, synthetic construct
KGPKPKKEESEK

SEQ ID NO: 941 - protein, 236 aa, synthetic construct; identical to SEQ ID NO: 23

SEQ ID NO: 942 - DNA, 708 bp, synthetic construct
  source 1..708: mol_type = other DNA
atgacctctgagaagggccctagcacaggcgaccccaccctgcggcggagaatcgagagctgggagttcgacgtgttctacgaccctagagaactgagaaaggaaacctgcctgctgtacgagatcaagtggggcatgagcagaaagatctggcggagctctggcaagaacaccaccaaccacgtggaagtgaatttcatcaagaagttcaccagcgagagaaggttccacagcagcatcagctgcagcatcacctggttcctgagctggtccccttgctgggaatgcagccaggccatcagagagttcctgagccaacaccccggagtgacactggtgatctacgtggccagactgttctggcacatggaccagagaaacagacagggcctgagagatctggtcaacagcggcgtgactatccagatcatgcgggccagcgagtactaccactgttggcggaacttcgtgaactacccccccggcgatgaggcccactggcctcagtaccctcctctgtggatgatgctgtacgccctggaactgcactgcatcatcctgtctctgcctccatgtctgaagatctctagaagatggcagaaccacctggccttcttcagactgcacctgcagaattgccactaccagaccatccccccccacatcctgctggctacaggcctgatccacccttctgtgacctggaga

SEQ ID NO: 943 - RNA, 100 nt, synthetic construct; identical to SEQ ID NO: 855
  source 1..100: mol_type = other RNA

SEQ ID NO: 944 - RNA, 109 nt, synthetic construct
  source 1..109: mol_type = other RNA
nnnnnnnnnnnnnnnnnnnnngttttagtactctgtaatgaaaattacagaatctactaaaacaaggcaaaatgccgtgtttatctcgtcaacttgttggcgagatttt

What is claimed is:

1. A method of altering a nucleobase of a complement component 3 (C3) polynucleotide, the method comprising contacting the C3 polynucleotide with a base editor system comprising one or more guide RNAs, or one or more polynucleotides encoding the one or more guide RNAs, and a base editor comprising a nucleic acid programmable DNA binding protein (napDNAbp) domain and a deaminase domain, or one or more polynucleotides encoding the base editor, wherein:
(a) said one or more guide RNAs targets said base editor to effect an alteration of a nucleobase of the C3 polynucleotide that disrupts a splice site in the C3 polynucleotide;
(b) the deaminase domain is a TadA variant (TadA*) comprising a combination of alterations listed in Table 5A, 5B, 5C, 5D, 5E, 6A, 6B, 6C, 6D, 6E, 6F, or 7, wherein the TadA* is not TadA*7.9 or TadA*7.10, and/or wherein the TadA* variant is a TadA*8.8, TadA*8.17, or TadA*8.20 variant comprising one or more of the amino acid alterations V82T, Y147T, and Q154S;
(c) the one or more guide RNAs comprises a nucleic acid sequence comprising at least 10-23 contiguous nucleotides of a spacer nucleic acid sequence listed in any one of Tables 1A, 1B, 1C, 1D, 1E, 1F, and 2;
(d) said one or more guide RNAs targets said base editor to effect an alteration of a nucleobase in a codon encoding an amino acid residue selected from the group consisting of A741, S742, H743, A747, L746, R748, S749, I1125, H1126, Q1127, and E1128 relative to the following reference sequence:
C3 amino acid sequence
MGPTSGPSLLLLLLTHLPLALGSPMYSIITPNILRLESEETMVLEAHDAQGDVPVTVTVHDF PGKKLVLSSEKTVLTPATNHMGNVTFTIPANREFKSEKGRNKFVTVQATFGTQVVEKVVLVS LQSGYLFIQTDKTIYTPGSTVLYRIFTVNHKLLPVGRTVMVNIENPEGIPVKQDSLSSQNQL GVLPLSWDIPELVNMGQWKIRAYYENSPQQVFSTEFEVKEYVLPSFEVIVEPTEKFYYIYNE KGLEVTITARFLYGKKVEGTAFVIFGIQDGEQRISLPESLKRIPIEDGSGEVVLSRKVLLDG VQNPRAEDLVGKSLYVSATVILHSGSDMVQAERSGIPIVTSPYQIHFTKTPKYFKPGMPFDL MVFVTNPDGSPAYRVPVAVQGEDTVQSLTQGDGVAKLSINTHPSQKPLSITVRTKKQELSEA EQATRTMQALPYSTVGNSNNYLHLSVLRTELRPGETLNVNFLLRMDRAHEAKIRYYTYLIMN KGRLLKAGRQVREPGQDLVVLPLSITTDFIPSFRLVAYYTLIGASGQREVVADSVWVDVKDS CVGSLVVKSGQSEDRQPVPGQQMTLKIEGDHGARVVLVAVDKGVFVLNKKNKLTQSKIWDVV EKADIGCTPGSGKDYAGVFSDAGLTFTSSSGQQTAQRAELQCPQPAARRRRSVQLTEKRMDK VGKYPKELRKCCEDGMRENPMRFSCQRRTRFISLGEACKKVFLDCCNYITELRRQHARASHL GLARSNLDEDIIAEENIVSRSEFPESWLWNVEDLKEPPKNGISTKLMNIFLKDSITTWEILA VSMSDKKGICVADPFEVTVMQDFFIDLRLPYSVVRNEQVEIRAVLYNYRQNQELKVRVELLH NPAFCSLATTKRRHQQTVTIPPKSSLSVPYVIVPLKTGLQEVEVKAAVYHHFISDGVRKSLK VVPEGIRMNKTVAVRTLDPERLGREGVQKEDIPPADLSDQVPDTESETRILLQGTPVAQMTE DAVDAERLKHLIVTPSGCGEQNMIGMTPTVIAVHYLDETEQWEKFGLEKRQGALELIKKGYT QQLAFRQPSSAFAAFVKRAPSTWLTAYVVKVFSLAVNLTIAIDSQVLCGAVKWLILEKQKPDG VFQEDAPVIHQEMIGGLRNNNEKDMALTAFVLISLQEAKDICEEQVNSLPGSITKAGDFLEA NYMNLQRSYTVAIAGYALAQMGRLKGPLLNKFLTTAKDKNRWEDPGKQLYNVEATSYALLAL LQLKDFDFVPPVVRWLNEQRYYGGGYGSTQATFMVFQALAQYQKDAPDHQELNLDVSLQLPS RSSKITHRIHWESASLLRSEETKENEGFTVTAEGKGQGTLSVVTMYHAKAKDQLTCNKFDLK VTIKPAPETEKRPQDAKNTMILEICTRYRGDQDATMSILDISMMTGFAPDTDDLKQLANGVD RYISKYELDKAFSDRNTLIIYLDKVSHSEDDCLAFKVHQYFNVELIQPGAVKVYAYYNLEES CTRFYHPEKEDGKLNKLCRDELCRCAEENCFIQKSDDKVTLEERLDKACEPGVDYVYKTRLV KVQLSNDFDEYIMAIEQTIKSGSDEVQVGQQRTFISPIKCREALKLEEKKHYLMWGLSSDFW GEKPNLSYIIGKDTWVEHWPEEDECQDEENQKQCQDLGAFTESMVVFGCPN (SEQ ID NO: 796), or a corresponding position in another C3 polypeptide sequence; or
(e) said one or more guide RNAs targets said base editor to effect an alteration of a nucleobase in a start codon of the C3 polynucleotide;
thereby altering the nucleobase of the C3 polynucleotide.

2. The method of claim 1,
wherein the splice site corresponds to any one of the protospacers listed in Table 1A, 1B, or 1C; wherein the deaminase is an adenosine deaminase selected from the group consisting of TadA*8.8, TadA*8.13, TadA*8.17, TadA*8.20, TadA*8.8_V82T, TadA*8.8_V82T_Y147T_Q154S, TadA*8.17_V82T, TadA*8.17_V82T_Y147T_Q154S, TadA*8.20_V82T, and TadA*8.20_V82T_Y147T_Q154S;
wherein the base editor is selected from the group consisting of ABE8.8, ABE8.13, ABE8.17, ABE8.20, ABE8.8_V82T, ABE8.8_V82T_Y147T_Q154S, ABE8.17_V82T, ABE8.17_V82T_Y147T_Q154S, ABE8.20_V82T, ABE8.20_V82T_Y147T_Q154S, BE4, and those base editors listed in Tables 1A, 1B, 1C, 1D, 1E, 1F, 2, and 8-15; and
wherein the one or more guide RNAs comprise a spacer consisting of from about 19 to about 23 nucleotides corresponding to a guide polynucleotide selected from the group consisting of gRNA676, gRNA661, gRNA715, gRNA821, gRNA837, gRNA838, gRNA827, gRNA828, gRNA829, gRNA3342, gRNA3343, and gRNA3345.

3. A method of altering a nucleobase of a complement component 3 (C3) polynucleotide, the method comprising contacting the C3 polynucleotide with one or more guide RNAs, or one or more polynucleotides encoding the one or more guide RNAs, and a base editor comprising a nucleic acid programmable DNA binding protein (napDNAbp) domain and a deaminase domain, or one or more polynucleotides encoding the base editor, wherein
(a) the deaminase domain is selected from the group consisting of TadA*8.8, TadA*8.13, TadA*8.17, TadA*8.20, TadA*8.8_V82T, TadA*8.8_V82T_Y147T_Q154S, TadA*8.17_V82T, TadA*8.17_V82T_Y147T_Q154S, TadA*8.20_V82T, TadA*8.20_V82T_Y147T_Q154S, rAPOBEC1, and ppAPOBEC; and
(b) the one or more guide RNAs comprise a spacer corresponding to a guide polynucleotide selected from the group consisting of gRNA661, gRNA662, gRNA676, gRNA695, gRNA696, gRNA701, gRNA715, gRNA821, gRNA837, gRNA838, gRNA827, gRNA828, gRNA829, gRNA1793, gRNA1798, gRNA3342, gRNA3343, and gRNA3345; thereby altering the nucleobase of a complement component 3 (C3) polynucleotide.

4. The method of claim 1, wherein the napDNAbp domain comprises a Cas9 variant comprising
one or more of the amino acid alterations A1283D and E1250K relative to an SpCas9 reference amino acid sequence;
wherein the Cas9 variant comprises one or more of the following combinations of amino acid alterations relative to an spCas9 reference amino acid sequence:
I322V, S409I, E427G, R654L, R753G, and R1114G;
I322V, S409I, E427G, R654L, R753G, R1114G, M1135L, Q1136Y, and R1337K;
I322V, S409I, E427G, R654L, R753G, R1114G, M1135L, Q1136Y, R1337K, and A1283D;
I322V, S409I, E427G, R654L, R753G, R1114G, M1135L, Q1136Y, R1337K, A1283D, R220A, and R221A;
I322V, S409I, E427G, R654L, R753G, R1114G, M1135L, Q1136Y, R1337K, A1283D, R765A, and Q768A;
I322V, S409I, E427G, R654L, R753G, R1114G, M1135L, Q1136Y, R1337K, A1283D, R765A, Q768A, K772A, and K775A;
I322V, S409I, E427G, R654L, R753G, R1114G, M1135L, R1337K, A1283D, and E1250K;
I322V, S409I, E427G, R654L, R753G, R1114G, Q1136Y, A1283D, and E1250K;
I322V, S409I, E427G, R654L, R753G, R1114G, Q1136Y, and R1337K; and
I322V, S409I, E427G, R654L, R753G, R1114G, and R1337K; and/or
wherein the Cas9 variant is a SaCas9-KHH, SpCas9-MQKFRAER, or SpCas9-VRQR.

5. The method of claim 4, wherein the one or more guide RNAs comprise one of the following nucleotide sequences:
End-mod SpCas9 guide polynucleotide:
(SEQ ID NO: 943)
mNsmNsmNsNNNNNNNNNNNNNNNNNGUUUUAGAGCUAGAAAUAGCAAG
UUAAAAUAAGGCUAGUCCGUUAUCAACUUGAAAAAGUGGCACCGAGUCG
GUGCUsmUsmUsmU;
End-mod SaCas9 guide polynucleotide:
(SEQ ID NO: 944)
mNsmNsmNsNNNNNNNNNNNNNNNNNNGUUUUAGUACUCUGUAAUGAAA
AUUACAGAAUCUACUAAAACAAGGCAAAAUGCCGUGUUUAUCUCGUCAA
CUUGUUGGCGAGAUsmUsmUsmU;
H M01:
(SEQ ID NO: 855)
mNsmNsmNsNNNNNNNNNNNNNNNNNGUUUUAGAmGmCmUmAmGmAmAm
AmUmAmGmCAAGUUAAAAUAAGGCUAGUCCGUUAUCAmAmCmUmUmGmA
mAmAmAmAmGmUmGmGmCmAmCmCmGmAmGmUmCmGmGmUmGmCmUsmU
smUsmU;
H M07:
(SEQ ID NO: 856)
mNsmNsmNsmNmNmNmNmNmNmNNNNNNNNNNNmGUUUUAGmAmGmCmU
mAmGmAmAmAmUmAmGmCmAmAGUUmAAmAAmUAmAmGmGmCmUmAGUm
CmCGUUAmUmCAAmCmUmUmGmAmAmAmAmAmGmUmGGmCmAmCmCmGm
AmGmUmCmGmGmUmGmCmUsmUsmUsmU;
NLS (bpsv 40):
(SEQ ID NOS: 857)
mNsmNsmNsNNNNNNNNNNNNNNNNNGUUUUAGAGCUAGAAAUAGCAAG
UUAAAAUAAGGCUAGUCCGUUAUCAACUUGAAAAAGUGGCACCGAGUCG
GUGCmUsmUsmUsmU;
LONG EST:
(SEQ ID NO: 859)
mNsmNsmNsNNNNNNNNNNNNNNNNNGUUUUAGAmGmCmCmGmGmCmGm
GmAmAmAmCmGmCmCmGmGmCAAGUUAAAAUAAGGCUAGUCCGUUAUCA
mAmCmUmUmGmAmAmAmAmAmGUGmGmCmAmCmCmGmAmGmUmCmGmGm
UmGmCmUsmUsmUsmU;
NLS+LONG ST:
(SEQ ID NOs: 860)
mNsmNsmNsNNNNNNNNNNNNNNNNNGUUUUAGAmGmCmCmGmGmCmGm
GmAmAmAmCmGmCmCmGmGmCAAGUUAAAAUAAGGCUAGUCCGUUAUCA
mAmCmUmUmGmAmAmAmAmAmGmUmGmGmCmAmCmCmGmAmGmUmCmGm
GmUmGmCmUsmUsmUsmU;
or
LONGEST+G OLD:
(SEQ ID NO: 861)
mNsmNsmNsNNNNNNNNNNNNNNNNNGUUUUAGAmGmCmCmGmGmCmGm
GmAmAmAmCmGmCmCmGmGmCAAGUUAAAAUAAGGCUAGUCCGUUAmUm
CAAmCmUmUGGACUUCGGUCCmAmAmGUGGmCmAmCmCmGmAmGmUmCm
GmGmUmGmCmUsmUsmUsmU;
wherein “mN” indicates a 2′-OMe modification of the nucleotide “N”, and “Ns” indicates that the nucleotide “N” is linked to the following nucleotide by a phosphorothioate (PS).

6. The method of claim 5, wherein one or more or the one or more guide RNAs are covalently linked at the 5′ end to a peptide having the following amino acid sequence:
(SEQ ID NO: 858)
CKRTADGSEFESPKKKRKV.

7. The method of claim 1, wherein the base editor comprises a linker peptide between the deaminase domain and the napDNAbp domain, wherein the linker peptide comprises the amino acid sequence KGPKPKKEESEK (SEQ ID NO: 940).

8. The method of claim 1, wherein the nucleobase alteration effects an alteration to an encoded amino acid residue, wherein the alteration disrupts opsonization by C3.

9. The method of claim 1, wherein said one or more guide RNAs targets said base editor to effect an alteration of a nucleobase in a codon encoding an amino acid residue selected from the group consisting of A741, S742, H743, A747, L746, R748, S749, I1125, H1126, Q1127, and E1128 relative to the following reference sequence:
C3 amino acid sequence
(SEQ ID NO: 796)
MGPTSGPSLLLLLLTHLPLALGSPMYSIITPNILRLESEETMVLEAHDAQGDVPVTVTVHDF
PGKKLVLSSEKTVLTPATNHMGNVTFTIPANREFKSEKGRNKFVTVQATFGTQVVEKVVLVS
LQSGYLFIQTDKTIYTPGSTVLYRIFTVNHKLLPVGRTVMVNIENPEGIPVKQDSLSSQNQL
GVLPLSWDIPELVNMGQWKIRAYYENSPQQVFSTEFEVKEYVLPSFEVIVEPTEKFYYIYNE
KGLEVTITARFLYGKKVEGTAFVIFGIQDGEQRISLPESLKRIPIEDGSGEVVLSRKVLLDG
VQNPRAEDLVGKSLYVSATVILHSGSDMVQAERSGIPIVTSPYQIHFTKTPKYFKPGMPFDL
MVFVTNPDGSPAYRVPVAVQGEDTVQSLTQGDGVAKLSINTHPSQKPLSITVRTKKQELSEA
EQATRTMQALPYSTVGNSNNYLHLSVLRTELRPGETLNVNFLLRMDRAHEAKIRYYTYLIMN
KGRLLKAGRQVREPGQDLVVLPLSITTDFIPSFRLVAYYTLIGASGQREVVADSVWVDVKDS
CVGSLVVKSGQSEDRQPVPGQQMTLKIEGDHGARVVLVAVDKGVFVLNKKNKLTQSKIWDVV
EKADIGCTPGSGKDYAGVFSDAGLTFTSSSGQQTAQRAELQCPQPAARRRRSVQLTEKRMDK
VGKYPKELRKCCEDGMRENPMRFSCQRRTRFISLGEACKKVELDCCNYITELRRQHARASHL
GLARSNLDEDIIAEENIVSRSEFPESWLWNVEDLKEPPKNGISTKLMNIFLKDSITTWEILA
VSMSDKKGICVADPFEVTVMQDFFIDLRLPYSVVRNEQVEIRAVLYNYRQNQELKVRVELLH
NPAFCSLATTKRRHQQTVTIPPKSSLSVPYVIVPLKTGLQEVEVKAAVYHHFISDGVRKSLK
VVPEGIRMNKTVAVRTLDPERLGREGVQKEDIPPADLSDQVPDTESETRILLQGTPVAQMTE
DAVDAERLKHLIVTPSGCGEQNMIGMTPTVIAVHYLDETEQWEKFGLEKRQGALELIKKGYT
QQLAFRQPSSAFAAFVKRAPSTWLTAYVVKVFSLAVNLIAIDSQVLCGAVKWLILEKQKPDG
VFQEDAPVIHQEMIGGLRNNNEKDMALTAFVLISLQEAKDICEEQVNSLPGSITKAGDFLEA
NYMNLQRSYTVAIAGYALAQMGRLKGPLLNKFLTTAKDKNRWEDPGKQLYNVEATSYALLAL
LQLKDFDFVPPVVRWLNEQRYYGGGYGSTQATFMVFQALAQYQKDAPDHQELNLDVSLQLPS
RSSKITHRIHWESASLLRSEETKENEGFTVTAEGKGQGTLSVVTMYHAKAKDQLTCNKFDLK
VTIKPAPETEKRPQDAKNTMILEICTRYRGDQDATMSILDISMMTGFAPDTDDLKQLANGVD
RYISKYELDKAFSDRNTLIIYLDKVSHSEDDCLAFKVHQYFNVELIQPGAVKVYAYYNLEES
CTRFYHPEKEDGKLNKLCRDELCRCAEENCFIQKSDDKVTLEERLDKACEPGVDYVYKTRLV
KVQLSNDFDEYIMAIEQTIKSGSDEVQVGQQRTFISPIKCREALKLEEKKHYLMWGLSSDFW
GEKPNLSYIIGKDTWVEHWPEEDECQDEENQKQCQDLGAFTESMVVFGCPN.

10. A method of treating a disease or disorder associated with inappropriate activation of the complement system in a subject in need thereof, the method comprising altering a nucleobase of a complement component 3 (C3) polynucleotide in the subject by administering to the subject one or more guide RNAs, or one or more polynucleotides encoding the one or more guide RNAs, and a base editor comprising a nucleic acid programmable DNA binding protein (napDNAbp) domain and a deaminase domain, or one or more polynucleotides encoding the base editor, wherein:
(a) said one or more guide RNAs targets said base editor to effect an alteration of the nucleobase of the C3 polynucleotide that disrupts a splice site in the C3 polynucleotide;
(b) the deaminase domain is a TadA variant (TadA*) comprising a combination of alterations listed in Table 5A, 5B, 5C, 5D, 5E, 6A, 6B, 6C, 6D, 6E, 6F, or 7, wherein the TadA* is not TadA*7.9 or TadA*7.10,
(c) the one or more guide RNAs comprise a nucleic acid sequence comprising at least 10-23 contiguous nucleotides of a spacer nucleic acid sequence listed in any one of Tables 1A, 1B, 1C, 1D, 1E, 1F, and 2; or
(d) said one or more guide RNAs targets said base editor to effect an alteration of a nucleobase in a codon encoding an amino acid residue selected from the group consisting of A741, S742, H743, A747, L746, R748, S749, I1125, H1126, Q1127, and E1128 relative to the following reference sequence:
C3 amino acid sequence
MGPTSGPSLLLLLLTHLPLALGSPMYSIITPNILRLESEETMVLEAHDAQGDVPVTVTVHDF PGKKLVLSSEKTVLTPATNHMGNVTFTIPANREFKSEKGRNKFVTVQATFGTQVVEKVVLVS LQSGYLFIQTDKTIYTPGSTVLYRIFTVNHKLLPVGRTVMVNIENPEGIPVKQDSLSSQNQL GVLPLSWDIPELVNMGQWKIRAYYENSPQQVFSTEFEVKEYVLPSFEVIVEPTEKFYYIYNE KGLEVTITARFLYGKKVEGTAFVIFGIQDGEQRISLPESLKRIPIEDGSGEVVLSRKVLLDG VQNPRAEDLVGKSLYVSATVILHSGSDMVQAERSGIPIVTSPYQIHFTKTPKYFKPGMPFDL MVFVTNPDGSPAYRVPVAVQGEDTVQSLTQGDGVAKLSINTHPSQKPLSITVRTKKQELSEA EQATRTMQALPYSTVGNSNNYLHLSVLRTELRPGETLNVNFLLRMDRAHEAKIRYYTYLIMN KGRLLKAGRQVREPGQDLVVLPLSITTDFIPSFRLVAYYTLIGASGQREVVADSVWVDVKDS CVGSLVVKSGQSEDRQPVPGQQMTLKIEGDHGARVVLVAVDKGVFVLNKKNKLTQSKIWDVV EKADIGCTPGSGKDYAGVFSDAGLTFTSSSGQQTAQRAELQCPQPAARRRRSVQLTEKRMDK VGKYPKELRKCCEDGMRENPMRFSCQRRTRFISLGEACKKVFLDCCNYITELRRQHARASHL GLARSNLDEDIIAEENIVSRSEFPESWLWNVEDLKEPPKNGISTKLMNIFLKDSITTWEILA VSMSDKKGICVADPFEVTVMQDFFIDLRLPYSVVRNEQVEIRAVLYNYRQNQELKVRVELLH NPAFCSLATTKRRHQQTVTIPPKSSLSVPYVIVPLKTGLQEVEVKAAVYHHFISDGVRKSLK VVPEGIRMNKTVAVRTLDPERLGREGVQKEDIPPADLSDQVPDTESETRILLQGTPVAQMTE DAVDAERLKHLIVTPSGCGEQNMIGMTPTVIAVHYLDETEQWEKFGLEKRQGALELIKKGYT QQLAFRQPSSAFAAFVKRAPSTWLTAYVVKVFSLAVNLIAIDSQVLCGAVKWLILEKQKPDG VFQEDAPVIHQEMIGGLRNNNEKDMALTAFVLISLQEAKDICEEQVNSLPGSITKAGDFLEA NYMNLQRSYTVAIAGYALAQMGRLKGPLLNKFLTTAKDKNRWEDPGKQLYNVEATSYALLAL LQLKDFDFVPPVVRWLNEQRYYGGGYGSTQATFMVFQALAQYQKDAPDHQELNLDVSLQLPS RSSKITHRIHWESASLLRSEETKENEGFTVTAEGKGQGTLSVVTMYHAKAKDQLTCNKFDLK VTIKPAPETEKRPQDAKNTMILEICTRYRGDQDATMSILDISMMTGFAPDTDDLKQLANGVD RYISKYELDKAFSDRNTLIIYLDKVSHSEDDCLAFKVHQYFNVELIQPGAVKVYAYYNLEES CTRFYHPEKEDGKLNKLCRDELCRCAEENCFIQKSDDKVTLEERLDKACEPGVDYVYKTRLV KVQLSNDFDEYIMAIEQTIKSGSDEVQVGQQRTFISPIKCREALKLEEKKHYLMWGLSSDFW GEKPNLSYIIGKDTWVEHWPEEDECQDEENQKQCQDLGAFTESMVVFGCPN (SEQ ID NO: 796), or a corresponding position in another C3 polypeptide sequence; or
(e) said one or more guide RNAs targets said base editor to effect an alteration of a nucleobase in a start codon of the C3 polynucleotide;
thereby treating the disease or disorder.

11. A method of treating a disease or disorder associated with inappropriate activation of the complement system in a subject in need thereof, the method comprising altering a nucleobase of a complement component 3 (C3) polynucleotide in the subject by administering to the subject one or more guide RNAs, or one or more polynucleotides encoding the one or more guide RNAs, and a base editor comprising a nucleic acid programmable DNA binding protein (napDNAbp) domain and a deaminase domain, or one or more polynucleotides encoding the base editor, wherein:
(a) the deaminase domain is selected from the group consisting of TadA*8.8, TadA*8.13, TadA*8.17, TadA*8.20, TadA*8.8_V82T, TadA*8.8_V82T_Y147T_Q154S, TadA*8.17_V82T, TadA*8.17_V82T_Y147T_Q154S, TadA*8.20_V82T, TadA*8.20_V82T_Y147T_Q154S, rAPOBEC1, and ppAPOBEC; and
(b)) the one or more guide RNAs comprise a spacer corresponding to a guide polynucleotide selected from the group consisting of gRNA661, gRNA662, gRNA676, gRNA695, gRNA696, gRNA701, gRNA715, gRNA821, gRNA837, gRNA838, gRNA827, gRNA828, gRNA829, gRNA1793, gRNA1798, gRNA3342, gRNA3343, and gRNA3345;
thereby treating the disease or disorder.

12. The method of claim 11, wherein C3 activity and/or expression is reduced by at least about 50% or 60% as compared to a control subject without the alteration.

13. The method of claim 11, wherein the inappropriate activation of the complement system is associated with increased levels of one or more of inflammation, the presence of autoantibodies, neural degeneration, and microthrombosis.

14. The method of claim 11, wherein the disease or disorder is selected from the group consisting of acute antibody-mediate rejection, age-related macular degeneration, allergic bronchopulmonary aspergillosis, allergic neuritis, allergic rhinitis, amyotrophic lateral sclerosis, anaphylaxis, and scleritis, atopic dermatitis, atypical hemolytic syndrome (aHUS), autoimmune hemolytic anemia, Bechet's disease, bronchiolitis, C3 glomerulopathy, central nervous system (CNS) inflammatory disorders, choroidal neovascularization (CNV), choroiditis, chronic allograft vasculopathy, chronic hepatitis, chronic muscle inflammation, chronic pain, chronic pancreatitis, chronic urticaria, Churg-Strauss syndrome, conjunctivitis, cyclitis, demyelinating disease, dermatitis, dermatomyositis, diabetic retinopathy, encephalitis, eosinophilic pneumonia, geographic atrophy, giant cell arteritis, glaucoma, glomerulonephritis, graft or transplant rejection or failure, HELLP syndrome, Henoch-Schonlein purpura, hypersensitivity pneumonitis, idiopathic pulmonary fibrosis (IPF), IgA nephropathy (IgAN), inflammatory bowel diseases, inflammatory joint conditions, inflammatory skin diseases, infusion reactions, interstitial pneumonia, iridocyclitis, iritis, ischemia/reperfusion injury, Kawasaki disease, keratitis, lupus nephritis, membranoproliferative glomerulonephritis (MPGN), meningitis, microscopic polyangiitis, myasthenia gravis, myocarditis, nasal polyposis, neuromyelitis optica, neuropathic pain, ocular inflammation, osteoarthritis, pancreatitis, panniculitis, paroxysmal nocturnal hemoglobinuria (PNH), pars planitis, pemphigoid, pemphigus, polyarteritis nodosa, polymyositis, primary membranous nephropathy, proliferative vitreoretinopathy, proteinuria, psoriasis, pulmonary fibrosis, renal disease, respiratory distress syndrome, retinal neovascularization (RNV), retinopathy of prematurity, rheumatoid arthritis (RA), rhinosinusitis, sarcoid, sarcoidosis, scleritis, scleroderma, sclerodermatomyositis, sclerosis, Sjogren syndrome, systemic lupus erythematosus, systemic scleroderma, Takayasu's arteritis, thyroiditis, thyroidoisis, ulcerative colitis, uveitis, vasculitis, and Wegener's granulomatosis.

15. A cell produced by the method of claim 1.

16. A base editor system comprising a base editor comprising a nucleic acid programmable DNA binding protein (napDNAbp) domain and a deaminase domain, or one or more polynucleotides encoding the base editor, and one or more guide polynucleotides, or one or more polynucleotides encoding the one or more guide polynucleotides, wherein the one or more guide polynucleotides comprise at least 10, 11, 12, 13, 14, 15, 16, 17, 18, 19, or contiguous nucleobases of a spacer listed in Table 1A, 1B, 1C, 1D, 1E, 1F, or 2; and
wherein the deaminase is a deaminase selected from the group consisting of TadA*8.8, TadA*8.13, TadA*8.17, TadA*8.20, TadA*8.8_V82T, TadA*8.8_V82T_Y147T_Q154S, TadA*8.17_V82T, TadA*8.17_V82T_Y147T_Q154S, TadA*8.20_V82T, and TadA*8.20_V82T_Y147T_Q154S, rAPOBEC1, and ppAPOBEC.
wherein the base editor is selected from the group consisting of ABE8.8, ABE8.13, ABE8.17, ABE8.20, ABE8.8_V82T, ABE8.8_V82T_Y147T_Q154S, ABE8.17_V82T, ABE8.17_V82T_Y147T_Q154S, ABE8.20_V82T, ABE8.20_V82T_Y147T_Q154S, BE4, and those base editors listed in Tables 1A, 1B, 1C, 1D, 1E, 1F, 2, and 8-15;
wherein the guide polynucleotide comprises a spacer consisting of from about 19 to about 23 nucleotides, and wherein the spacer corresponds to a guide polynucleotide selected from the group consisting of gRNA676, gRNA661, gRNA715, gRNA821, gRNA837, gRNA838, gRNA827, gRNA828, gRNA829, gRNA3342, gRNA3343, and gRNA3345;
wherein the napDNAbp domain comprises a Cas9 variant comprising:
one or more of the amino acid alterations A1283D and E1250K relative to an SpCas9 reference amino acid sequence;
one or more of the following combinations of amino acid alterations relative to an spCas9 reference amino acid sequence:
I322V, S409I, E427G, R654L, R753G, and R1114G;
I322V, S409I, E427G, R654L, R753G, R1114G, M1135L, Q1136Y, and R1337K;
I322V, S409I, E427G, R654L, R753G, R1114G, M1135L, Q1136Y, R1337K, and A1283D;
I322V, S409I, E427G, R654L, R753G, R1114G, M1135L, Q1136Y, R1337K, A1283D, R220A, and R221A;
I322V, S409I, E427G, R654L, R753G, R1114G, M1135L, Q1136Y, R1337K, A1283D, R765A, and Q768A;
I322V, S409I, E427G, R654L, R753G, R1114G, M1135L, Q1136Y, R1337K, A1283D, R765A, Q768A, K772A, and K775A;
I322V, S409I, E427G, R654L, R753G, R1114G, M1135L, R1337K, A1283D, and E1250K;
I322V, S409I, E427G, R654L, R753G, R1114G, Q1136Y, A1283D, and E1250K;
I322V, S409I, E427G, R654L, R753G, R1114G, Q1136Y, and R1337K; and
I322V, S409I, E427G, R654L, R753G, R1114G, and R1337K; and/or
wherein the one or more guide polynucleotides comprise one of the following nucleotide sequences:
End-mod SpCas9 guide polynucleotide:
(SEQ ID NO: 943)
mNsmNsmNsNNNNNNNNNNNNNNNNNGUUUUAGAGCUAGAAAUAGCAAG
UUAAAAUAAGGCUAGUCCGUUAUCAACUUGAAAAAGUGGCACCGAGUCG
GUGCUsmUsmUsmU;
End-mod SaCas9 guide polynucleotide:
(SEQ ID NO: 944)
mNsmNsmNsNNNNNNNNNNNNNNNNNNGUUUUAGUACUCUGUAAUGAAA
AUUACAGAAUCUACUAAAACAAGGCAAAAUGCCGUGUUUAUCUCGUCAA
CUUGUUGGCGAGAUsmUsmUsmU;
HM01:
(SEQ ID NO: 855)
mNsmNsmNsNNNNNNNNNNNNNNNNNGUUUUAGAmGmCmUmAmGmAmAm
AmUmAmGmCAAGUUAAAAUAAGGCUAGUCCGUUAUCAmAmCmUmUmGmA
mAmAmAmAmGmUmGmGmCmAmCmCmGmAmGmUmCmGmGmUmGmCmUsmU
smUsmU;
HM07:
(SEQ ID NO: 856)
mNsmNsmNsmNmNmNmNmNmNmNNNNNNNNNNNmGUUUUAGmAmGmCmU
mAmGmAmAmAmUmAmGmCmAmAGUUmAAmAAmUAmAmGmGmCmUmAGUm
CmCGUUAmUmCAAmCmUmUmGmAmAmAmAmAmGmUmGGmCmAmCmCmGm
AmGmUmCmGmGmUmGmCmUsmUsmUsmU;
NLS (bpsv40):
(SEQ ID NOS: 857)
mNsmNsmNsNNNNNNNNNNNNNNNNNGUUUUAGAGCUAGAAAUAGCAAG
UUAAAAUAAGGCUAGUCCGUUAUCAACUUGAAAAAGUGGCACCGAGUCG
GUGCmUsmUsmUsmU;
LONGEST:
(SEQ ID NO: 859)
mNsmNsmNsNNNNNNNNNNNNNNNNNGUUUUAGAmGmCmCmGmGmCmGm
GmAmAmAmCmGmCmCmGmGmCAAGUUAAAAUAAGGCUAGUCCGUUAUCA
mAmCmUmUmGmAmAmAmAmAmGUGmGmCmAmCmCmGmAmGmUmCmGmGm
UmGmCmUsmUsmUsmU;
NLS+LONGEST:
(SEQ ID NOs: 860)
mNsmNsmNsNNNNNNNNNNNNNNNNNGUUUUAGAmGmCmCmGmGmCmGm
GmAmAmAmCmGmCmCmGmGmCAAGUUAAAAUAAGGCUAGUCCGUUAUCA
mAmCmUmUmGmAmAmAmAmAmGmUmGmGmCmAmCmCmGmAmGmUmCmGm
GmUmGmCmUsmUsmUsmU;
or
LONGEST+GOLD:
(SEQ ID NO: 861)
mNsmNsmNsNNNNNNNNNNNNNNNNNGUUUUAGAmGmCmCmGmGmCmGm
GmAmAmAmCmGmCmCmGmGmCAAGUUAAAAUAAGGCUAGUCCGUUAmUm
CAAmCmUmUGGACUUCGGUCCmAmAmGUGGmCmAmCmCmGmAmGmUmCm
GmGmUmGmCmUsmUsmUsmU;
wherein “nN” indicates a 2′-OMe modification of the nucleotide “N”, and “Ns” indicates that the nucleotide “N” is linked to the following nucleotide by a phosphorothioate (PS):

17. A polynucleotide or set of polynucleotides encoding the base editor system of claim 16, or a component thereof.

18. A kit comprising the base editor system of claim 16.

19. A pharmaceutical composition comprising an effective amount of the base editor system of claim 16.

20. A guide polynucleotide comprising a spacer sequence listed in Table 1A, 1B, 1C, 1D, 1E, 1F, or 2.

21. A base editor system comprising a base editor comprising a nucleic acid programmable DNA binding protein (napDNAbp) domain and a deaminase domain, or one or more polynucleotides encoding the base editor, and one or more guide polynucleotides, or one or more polynucleotides encoding the one or more guide polynucleotides, wherein
a) the guide polynucleotide comprises a spacer corresponding to gRNA676, the napDNAbp domain is an SpCas9, and the deaminase domain is selected from the group consisting of TadA*8.8 with the amino acid alterations V82T, Y147T, and Q154S, TadA*8.20 with the amino acid alterations V82T, Y147T, and Q154S, TadA*8.8, TadA*8.13, and TadA*8.20 with the amino acid alteration V82T;
b) the guide polynucleotide comprises a spacer corresponding to gRNA661, the napDNAbp domain is an SpCas9 or an SpCas9 with the amino acid alterations A1283D and E1250K, and the deaminase domain is selected from the group consisting of TadA*8.20 with the amino acid alterations V82T, Y147T, and Q154S, TadA*8.8, TadA*8.13, TadA*8.20, TadA*8.8 with the amino acid alteration V82T, TadA*8.8 with the amino acid alterations V82T, Y147T, and Q154S, and TadA*8.20 with the amino acid alteration V82T;
c) the guide polynucleotide comprises a spacer corresponding to gRNA696, the napDNAbp domain is an SpCas9 or an SpCas9 with the amino acid alterations A1283D and E1250K, and the deaminase domain is selected from the group consisting of TadA*8.8, TadA*8.13, TadA*8.20, TadA*8.20 with the amino acid alteration V82T, and TadA*8.20 with the amino acid alterations V82T, Y147T, and Q154S;
d) the guide polynucleotide comprises a spacer corresponding to gRNA715, the napDNAbp domain is an SpCas9 or an SpCas9-VRQR, and the deaminase domain is selected from the group consisting of TadA*8.8, TadA*8.13, and TadA*8.20 with the amino acid alteration V82T;
e) the guide polynucleotide comprises a spacer corresponding to gRNA821, the napDNAbp is an SpCas9, the deaminase domain is a cytidine deaminase domain, and the base editor further comprises two uracil glycosylase inhibitors;
f) the guide polynucleotide comprises a spacer corresponding to gRNA827, the napDNAbp is an SpCas9, and the deaminase domain is TadA*8.8;
g) the guide polynucleotide comprises a spacer corresponding to gRNA828, the napDNAbp is h) an SpCas9, and the deaminase domain is TadA*8.8;
h) the guide polynucleotide comprises a spacer corresponding to gRNA829, the napDNAbp is an SpCas9, and the deaminase domain is TadA*8.8;
i) the guide polynucleotide comprises a spacer corresponding to gRNA837, the napDNAbp is an SpCas9-VRQR, and the deaminase domain is TadA*8.8;
j) the guide polynucleotide comprises a spacer corresponding to gRNA838, the napDNAbp is an SpCas9-VRQR, and the deaminase domain is TadA*8.8;
k) the guide polynucleotide comprises a spacer corresponding to gRNA3342, the napDNAbp is an SpCas9, and the deaminase is selected from the group consisting of TadA*8.8, TadA*8.13, TadA*8.20, TadA*8.8 with the amino acid alterations V82T, Y147T, and Q154S, TadA*8.17 with the amino acid alteration V82T, TadA*8.17 with the amino acid alterations V82T, Y147T, and Q154S, TadA*8.20 with the amino acid alteration V82T, and TadA*8.20 with the amino acid alterations V82T, Y147T, and Q154S;
l) the guide polynucleotide comprises a spacer corresponding to gRNA3343, the napDNAbp is selected from the group consisting of
i) SpCas9-MQKFRAER;
ii) SpCas9-MQKFRAER with the combination of amino acid alterations I322V, S409I, E427G, R654L, R753G, R1114G, and R1337K;
iii) SpCas9-MQKFRAER with the combination of amino acid alterations I322V, S409I, E427G, R654L, R753G, R1114G, Q1136Y, A1283D, and E1250K; and
iv) SpCas9-MQKFRAER with the combination of amino acid alterations I322V, S409I, E427G, R654L, R753G, and R1114G; and
the deaminase domain is TadA*8.20 or TadA*7.10; or
m) the guide polynucleotide comprises a spacer corresponding to gRNA3345, the napDNAbp domain is an SaCas9-KHH, the deaminase domain is a cytidine deaminase domain, and the base editor further comprises two uracil glycosylase inhibitors.

22. A polynucleotide or set of polynucleotides encoding the base editor system of claim 21.

23. A cell or lipid nanoparticle comprising the base editor system of claim 21.

24. A method of using the base editor system of claim 21 to edit a C3 polynucleotide for the treatment of a disease.
